(19) United States
(12) Patent Application Publication
(10) Pub. No.: US 2025/0327058 A1
(43) Pub. Date: Oct. 23, 2025

(54) ENGINEERED PHENYLALANINE AMMONIA LYASE AND TYROSINE AMMONIA LYASE ENZYMES FOR PRODUCING AROMATIC COMPOUNDS

(71) Applicant: Ginkgo Bioworks, Inc., Boston, MA (US)

(72) Inventors: Nadia Parachin, Lexington, MA (US); Pichet Praveschotinunt, Medford, MA (US); Nathan W. Schmidt, Milton, MA (US)

(73) Assignee: Ginkgo Bioworks, Inc., Boston, MA (US)

(21) Appl. No.: 18/868,926

(22) PCT Filed: May 25, 2023
(86) PCT No.: PCT/US2023/067497

§ 371 Date: Nov. 25, 2024

Related U.S. Application Data
(60) Provisional application No. 63/346,101, filed on May 26, 2022.

(51) Int. Cl. C12N 9/00; C12N 1/18; C12N 1/20; C12N 9/02; C12N 9/88; C12P 7/42; C12R 1/19; C12R 1/84; C12R 1/865

(52) U.S. Cl. CPC C12N 9/93; C12N 1/18; C12N 1/20; C12N 9/0071; C12N 9/88; C12P 7/42; C12Y 114/14; C12Y 403/01023; C12Y 403/01024; C12Y 602/01012; C12R 2001/19; C12R 2001/84; C12R 2001/865

(57) ABSTRACT

Aspects of the disclosure relate to aromatic amino acid ammonia lyases (ALs), phenylalanine ammonia lyases (PALs), and tyrosine ammonia lyase (TALs), including engineered enzymes, and their use in catalyzing chemical reactions.

### CROSS-REFERENCE TO RELATED APPLICATIONS

[0001] This application claims the benefit under 35 U.S.C. § 119 (e) of U.S. Provisional Application No. 63/346,101, filed May 26, 2022, entitled, “ENGINEERED PHENYLALANINE AMMONIA LYASE AND TYROSINE AMMONIA LYASE ENZYMES FOR PRODUCING AROMATIC COMPOUNDS,” the entire disclosure of which is hereby incorporated by reference in its entirety.

### REFERENCE TO AN ELECTRONIC SEQUENCE LISTING

[0002] The contents of the electronic sequence listing (G091970083WO00-SEQ-KVC.xml; Size: 1,439,434 bytes; and Date of Creation: May 11, 2023) is herein incorporated by reference in its entirety.

### FIELD OF THE INVENTION

[0003] The present disclosure relates to the use of engineered phenylalanine ammonia lyase enzymes and tyrosine ammonia lyase enzymes for production of aromatic compounds.

### BACKGROUND

[0004] Aromatic compounds have useful pharmacological properties as well as properties useful for the flavor and fragrance industry. Trans-cinnamic acid can be used for producing flavors, dyes and pharmaceuticals. p-coumaric acid is a precursor of many phenolic compounds and its conjugates are of interest due to their antioxidant, anti-cancer, antimicrobial, antivirus, anti-inflammatory, antiplatelet aggregation, anxiolytic, antipyretic, analgesic, and anti-arthritis properties. Trans-cinnamic acid and p-coumaric acid are also highly sought after in the flavor and fragrance industries due their desirable characteristics. For example, trans-cinnamic acid has a honey-like odor and can be used to impart cinnamon-like flavors, while p-coumaric acid is found in many natural foods and beverages. Chemical synthesis of trans-cinnamic acid and p-coumaric acid is laborious and often results in low yields.

### SUMMARY

[0005] Aspects of the present disclosure relate to a host cell that comprises a heterologous polynucleotide encoding an aromatic amino acid ammonia lyase (AL), wherein the amino acid sequence of the AL comprises: a histidine (H) at a position corresponding to position 102 in the sequence of SEQ ID NO: 1; an isoleucine (I) at a position corresponding to position 104 in the sequence of SEQ ID NO: 1; a valine (V) at a position corresponding to position 104 in the sequence of SEQ ID NO: 1; a histidine (H) at a position corresponding to position 107 in the sequence of SEQ ID NO: 1; a serine(S) at a position corresponding to position 107 in the sequence of SEQ ID NO: 1; a tyrosine (Y) at a position corresponding to position 107 in the sequence of SEQ ID NO: 1; a methionine (M) at a position corresponding to position 108 in the sequence of SEQ ID NO: 1; or any combination thereof.

[0006] In some embodiments, the AL is a phenylalanine ammonia lyase (PAL). In some embodiments, the amino acid sequence of the PAL comprises substitutions at positions corresponding to the following positions in the sequence of SEQ ID NO: 1: positions 102, 104, and 218; positions 104, 108, and 218; positions 102, 104, 108, 218, and 222; positions 102 and 222; positions 102, 104, and 219; positions 102, 108, and 222; positions 102, 108, 218, and 222; positions 102 and 218; positions 102, 104, 108, and 222; positions 102, 104, and 108; positions 102, 218, and 222; positions 102, 104, 219, and 222; positions 102 and 108; positions 104 and 222; positions 102, 108, and 218; or positions 104 and 108.

[0007] In some embodiments, the amino acid sequence of the PAL comprises the following amino acid substitutions relative to the sequence of SEQ ID NO: 1: T102H, L104M, and G218A; L104M, L108T, and G218A; T102E, L104M, L108T, G218A, and M222L; T102S and M222L; T102H, L104M, and L219I; T102H, L104M, L108T, G218A, and M222V; T102S, L108T, and M222L; T102S, L108T, G218S, and M222L; T102E, L108T, and M222I; T102E and G218S; T102K, L104I, L108T, and M222L; T102S, L104M, and L108M; T102K, G218A, and M222T; T102S, L104M, L219I, and M222L; T102H and L108T; L104M and M222V; T102H, L104M, G218A, and M222T; T102S, L108V, and G218A; L104A, L108T, and G218A; L104V and L108T; or T102K, L108V, and M222L.

[0008] In some embodiments, the amino acid sequence of the PAL comprises the following amino acid substitutions relative to the sequence of SEQ ID NO: 1: T102H, L104A, and G218A; T102K, L104V, L219I, and M222V; T102K, L108V, and M222L; T102H, L108M, G218A, and M222T; T102K, L104A, and M222I; T102K and M222T; T102K and L104I; L104M and M222V; T102S, L108M, and G218S; T102E and L108M; T102E, L108M, and G218A; T102S and L108M; L102K and L108M; or L108M.

[0009] In some embodiments, the AL is a tyrosine ammonia lyase (TAL). In some embodiments, the amino acid sequence of the TAL comprises substitutions at positions corresponding to the following positions in the sequence of SEQ ID NO: 1: positions 104, 108, 219, and 222; positions 102, 108, 218, and 219; positions 102, 104, 108, 219, and 222; positions 102, 107, 108, 218, 219, and 222; positions 104, 108, 218, 219, and 222; positions 102, 104, 107, and 222; positions 102, 104, 107, 108, 219, and 222; positions 104, 218, and 222; positions 102, 108, 218, 219, and 222; positions 104, 108, and 218; positions 102, 107, 108, 219, and 222; positions 104, 107, 108, and 222; positions 102, 104, 108, 218, and 219; positions 102, 104, 107, 219, and 222; positions 102, 108, 218, and 222; positions 102, 108, and 222; positions 102, 104, 108, and 219; positions 102, 104, 107, 108, 218, 219, and 222; positions 102, 104, 107, 108, 218, and 219; positions 102, 107, 108, 219, and 222; positions 102, 104, 107, 108, 218, and 222; or positions 102, 104, 107, 108, and 219.

[0010] In some embodiments, the amino acid sequence of the TAL comprises the following amino acid substitutions relative to the sequence of SEQ ID NO: 1: L104A, L108Q, L219I, and M222N; T102S, L108Q, G218A, and L219I; T102H, L104M, L108M, L219I, and M222L; T102E, F107Y, L108M, G218S, L219I, and M222N; L104I, L108H, G218A, L219I, and M222V; T102E, L104M, F107Y, and M222I; T102E, L104V, F107Y, L108M, L219I, and M222T; T102S, L104I, G218S, L219I, and M222V; L104V, G218A, and M222L; T102K, L108H, G218A, L219I, and M222T; L104I, L108M, and G218S; T102H, F107Y, L108M, L219I, and M222V; L104V, F107H, L108Q, and M222L; T102K, L104A, L108Q, G218A, and L219I; T102S, L104A, F107S, L219I, and M222N; T102S, L108H, G218S, and M222V; T102K, L104A, L108H, L219I, and M222N; T102S, L108H, and M222N; T102H, L104M, L108M, and L219I; T102K, L104A, F107Y, L108V, G218A, L219I, and M222N; T102H, L108M, G218S, and M222L; T102E, L104M, F107Y, L108M, G218A, and L219I; T102E, L104V, F107H, and M222N; T102H, F107H, L108M, L219I, and M222T; T102H, L104V, F107S, L108Q, G218S, and M222T; T102E, L104M, F107S, L108M, G218A, and L219I; or T102E, L104V, F107Y, L108M, and L219I.

[0011] Aspects of the present disclosure relate to a host cell that comprises a heterologous polynucleotide encoding an AL, wherein the amino acid sequence of the AL comprises an amino acid substitution at a position corresponding to amino acid residue F107 relative to the sequence of SEQ ID NO: 1. In some embodiments, the amino acid sequence of the AL comprises: a histidine (H) at a position corresponding to position 107 in the sequence of SEQ ID NO: 1; a serine(S) at a position corresponding to position 107 in the sequence of SEQ ID NO: 1; or a tyrosine (Y) at a position corresponding to position 107 in the sequence of SEQ ID NO: 1.

[0012] Aspects of the present disclosure relate to a host cell that comprises: a first heterologous polynucleotide encoding an AL, wherein the amino acid sequence of the AL comprises one or more amino acid substitutions relative to the sequence of SEQ ID NO:1, and a second heterologous polynucleotide encoding a coumarate ligase (4CL).

[0013] Aspects of the present disclosure relate to a mixture comprising: a host cell comprising a first heterologous polynucleotide encoding an AL, wherein the amino acid sequence of the AL comprises one or more amino acid substitutions relative to the sequence of SEQ ID NO: 1, and a medium comprising exogenously supplied glucose, phosphoenolpyruvate, erythrose 4-phosphate, 3-deoxy-D-arabino-hept-2-ulosonate 7-phosphate, 3-dehydroquinate, 3-dehydroshikimate, shikimate, chorismate, prephenate, phenylpyruvate, hydroxyphenylpyruvate, phenylalanine, or tyrosine.

[0014] In some embodiments, the amino acid sequence of the AL comprises an amino acid substitution at a position corresponding to amino acid residue 102, 104, 107, 108, 218, 219, or 222 relative to the sequence of SEQ ID NO: 1. In some embodiments, the AL comprises: a serine(S) at a position corresponding to position 102 in the sequence of SEQ ID NO: 1; a glutamic acid (E) at a position corresponding to position 102 in the sequence of SEQ ID NO: 1; a lysine (K) at a position corresponding to position 102 in the sequence of SEQ ID NO: 1; a histidine (H) at a position corresponding to position 102 in the sequence of SEQ ID NO: 1; a methionine (M) at a position corresponding to position 104 in the sequence of SEQ ID NO: 1; an alanine (A) at a position corresponding to position 104 in the sequence of SEQ ID NO: 1; an isoleucine (I) at a position corresponding to position 104 in the sequence of SEQ ID NO: 1; a valine (V) at a position corresponding to position 104 in the sequence of SEQ ID NO: 1; a histidine (H) at a position corresponding to position 107 in the sequence of SEQ ID NO: 1; a serine(S) at a position corresponding to position 107 in the sequence of SEQ ID NO: 1; a tyrosine (Y) at a position corresponding to position 107 in the sequence of SEQ ID NO: 1; a threonine (T) at a position corresponding to position 108 in the sequence of SEQ ID NO: 1; a valine (V) at a position corresponding to position 108 in the sequence of SEQ ID NO: 1; a glutamine (Q) at a position corresponding to position 108 in the sequence of SEQ ID NO: 1; a methionine (M) at a position corresponding to position 108 in the sequence of SEQ ID NO: 1; an alanine (A) at a position corresponding to position 218 in the sequence of SEQ ID NO: 1; a serine(S) at a position corresponding to position 218 in the sequence of SEQ ID NO: 1; an isoleucine (I) at a position corresponding to position 219 in the sequence of SEQ ID NO: 1; a leucine (L) at a position corresponding to position 222 in the sequence of SEQ ID NO: 1; an asparagine (N) at a position corresponding to position 222 in the sequence of SEQ ID NO: 1; an isoleucine (I) at a position corresponding to position 222 in the sequence of SEQ ID NO: 1; a valine (V) at a position corresponding to position 222 in the sequence of SEQ ID NO: 1; a threonine (T) at a position corresponding to position 222 in the sequence of SEQ ID NO: 1; or any combination thereof.

[0015] In some embodiments, the AL is a PAL. In some embodiments, relative to the sequence of SEQ ID NO: 1, the PAL comprises substitutions at positions corresponding to the following positions in the sequence of SEQ ID NO: 1: positions 102, 104, and 218; positions 104, 108, and 218; positions 102, 104, 108, 218, and 222; positions 102 and 222; positions 102, 104, and 219; positions 102, 108, and 222; positions 102, 108, 218, and 222; positions 102 and 218; positions 102, 104, 108, and 222; positions 102, 104, and 108; positions 102, 218, and 222; positions 102, 104, 219, and 222; positions 102 and 108; positions 104 and 222; positions 102, 108, and 218; or positions 104 and 108.

[0016] In some embodiments, the amino acid sequence of the PAL comprises the following amino acid substitutions relative to the sequence of SEQ ID NO: 1: T102H, L104M, and G218A; L104M, L108T, and G218A; T102E, L104M, L108T, G218A, and M222L; T102S and M222L; T102H, L104M, and L219I; T102H, L104M, L108T, G218A, and M222V; T102K and G218A; T102S, L108T, and M222L; T102S, L108T, G218S, and M222L; T102E, L108T, and M222I; T102E and G218S; T102K, L104I, L108T, and M222L; T102S, L104M, and L108M; T102K, G218A, and M222T; T102S, L104M, L219I, and M222L; T102H and L108T; L104M and M222V; T102H, L104M, G218A, and M222T; T102S, L108V, and G218A; L104A, L108T, and G218A; L104V and L108T; or T102K, L108V, and M222L.

[0017] In some embodiments, the AL is a TAL. In some embodiments, the TAL comprises substitutions at positions corresponding to the following positions in the sequence of SEQ ID NO: 1: positions 104, 108, 219, and 222; positions 102, 108, 218, and 219; positions 102, 104, 108, 219, and 222; positions 102, 107, 108, 218, 219, and 222; positions 104, 108, 218, 219, and 222; positions 102, 104, 107, and 222; positions 102, 104, 107, 108, 219, and 222; positions 104, 218, and 222; positions 102, 108, 218, 219, and 222; positions 104, 108, and 218; positions 102, 107, 108, 219, and 222; positions 104, 107, 108, and 222; positions 102, 104, 108, 218, and 219; positions 102, 104, 107, 219, and 222; positions 102, 108, 218, and 222; positions 102, 108, and 222; positions 102, 104, 108, and 219; positions 102, 104, 107, 108, 218, 219, and 222; positions 102, 104, 107, 108, 218, and 219; positions 102, 107, 108, 219, and 222; positions 102, 104, 107, 108, 218, and 222; or positions 102, 104, 107, 108, and 219.

[0018] In some embodiments, the amino acid sequence of the TAL comprises the following amino acid substitutions relative to the sequence of SEQ ID NO: 1: L104A, L108Q, L219I, and M222N; T102S, L108Q, G218A, and L219I; T102H, L104M, L108M, L219I, and M222L; T102E, F107Y, L108M, G218S, L219I, and M222N; L104I, L108H, G218A, L219I, and M222V; T102E, L104M, F107Y, and M222I; T102E, L104V, F107Y, L108M, L219I, and M222T; T102S, L104I, G218S, L219I, and M222V; L104V, G218A, and M222L; T102K, L108H, G218A, L219I, and M222T; L104I, L108M, and G218S; T102H, F107Y, L108M, L219I, and M222V; L104V, F107H, L108Q, and M222L; T102K, L104A, L108Q, G218A, and L219I; T102S, L104A, F107S, L219I, and M222N; T102S, L108H, G218S, and M222V; T102K, L104A, L108H, L219I, and M222N; T102S, L108H, and M222N; T102H, L104M, L108M, and L219I; T102K, L104A, F107Y, L108V, G218A, L219I, and M222N; T102H, L108M, G218S, and M222L; T102E, L104M, F107Y, L108M, G218A, and L219I; T102E, L104V, F107H, and M222N; T102H, F107H, L108M, L219I, and M222T; T102H, L104V, F107S, L108Q, G218S, and M222T; T102E, L104M, F107S, L108M, G218A, and L219I; or T102E, L104V, F107Y, L108M, and L219I.

[0019] In some embodiments, the amino acid sequence of the TAL comprises the following amino acid substitutions relative to the sequence of SEQ ID NO: 1: T102E, L104V, F107Y, and L108H; T102E, F107Y, L108H, G218A, and M222I; T102S, F107Y, L108H, G218A, and M222T; T102E, L104M, F107Y, L108H, and G218A; L219I and M222T; F107Y, L108H, L219I, and M222T; L104A, L108Q, L219I, and M222N; T102S, L108Q, G218A, and L219I; T102H, L104M, L108M, and L219I; M222L; T102E, F107Y, L108M, and G218S; L219I and M222N; L104I, L108H, G218A, and L219I; M222V; T102E, L104M, F107Y, and M222I; T102E, F107Y, L108H, and M222I; T102E, F107Y, L108H, and G218A; T102S, F107Y, and L108H; T102E, F107Y, L108H, and M222T; or T102E, F107Y, L108H, and L219I.

[0020] In some embodiments, the AL comprises an amino acid sequence that has at least 90% identity to the sequence of SEQ ID NO: 1. In some embodiments, the heterologous polynucleotide comprises a sequence that is at least 90% identical to the sequence of SEQ ID NO: 2. In some embodiments, the host cell is a bacterial cell, an archaebacterial cell, an algal cell, a fungal cell, a yeast cell, a plant cell, an animal cell, a mammalian cell, or a human cell. In some embodiments, the host cell is a filamentous fungi cell or a yeast cell. In some embodiments, the yeast cell is a Saccharomyces cell, a Yarrowia cell, a Komagataella cell, or a Pichia cell. In some embodiments, the Saccharomyces cell is a Saccharomyces cerevisiae cell. In some embodiments, the yeast cell is Yarrowia cell. In some embodiments, the host cell is a bacterial cell. In some embodiments, the bacterial cell is an E. coli cell.

[0021] In some embodiments, the AL is able to convert phenylalanine to trans-cinnamic acid. In some embodiments, the AL is able to convert tyrosine to p-coumaric acid. In some embodiments, the host cell comprises one or more enzymes of the shikimate pathway capable of converting phosphoenolpyruvate and erythrose 4-phosphate to chorismate. In some embodiments, one or more of the enzymes of the shikimate pathway are encoded by a heterologous polynucleotide. In some embodiments, the amino acid sequence(s) of one or more of the enzymes of the shikimate pathway comprise one or more substitutions relative to the amino acid sequence(s) of a wild-type shikimate pathway enzyme. In some embodiments, the host cell further comprises a heterologous polynucleotide encoding a cinnamate 4-hydroxylase (C4H), a heterologous polynucleotide encoding a coumarate ligase (4CL), or both. In some embodiments, the amino acid sequence of C4H comprises one or more substitutions relative to the amino acid sequence of a parent C4H (SEQ ID NO: 389). In some embodiments, the amino acid sequence of 4CL comprises one or more substitutions relative to the amino acid sequence of wild-type 4CL. In some embodiments, the host cell further comprises a heterologous polynucleotide encoding one, two, three, four, five, or all of: a coumarate ligase (4CL), a double bond reductase (DBR), a chalcone synthase (CHS), a chalcone 3-hydroxylase (CH3H), an O-methyltransferase (OMT), and an UDP dependent glycosyltransferase (UGT). In some embodiments, the amino acid sequence(s) of one, two, three, four, five, or all of 4CL, DBR, CHS, CH3H, OMT, or UGT comprises one or more substitutions relative to the amino acid sequence(s) of a wild-type version of the protein.

[0022] Aspects of the present disclosure relate to an AL, wherein the amino acid sequence of the AL comprises: a histidine (H) at a position corresponding to position 102 in the sequence of SEQ ID NO: 1; an isoleucine (I) at a position corresponding to position 104 in the sequence of SEQ ID NO: 1; a valine (V) at a position corresponding to position 104 in the sequence of SEQ ID NO: 1; a histidine (H) at a position corresponding to position 107 in the sequence of SEQ ID NO: 1; a serine(S) at a position corresponding to position 107 in the sequence of SEQ ID NO: 1; a tyrosine (Y) at a position corresponding to position 107 in the sequence of SEQ ID NO: 1; a methionine (M) at a position corresponding to position 108 in the sequence of SEQ ID NO: 1; or any combination thereof.

[0023] In some embodiments, the AL is a PAL. In some embodiments, the amino acid sequence of the AL comprises substitutions at positions corresponding to the following positions in the sequence of SEQ ID NO: 1: positions 102, 104, and 218; positions 104, 108, and 218; positions 102, 104, 108, 218, and 222; positions 102 and 222; positions 102, 104, and 219; positions 102, 108, and 222; positions 102, 108, 218, and 222; positions 102 and 218; positions 102, 104, 108, and 222; positions 102, 104, and 108; positions 102, 218, and 222; positions 102, 104, 219, and 222; positions 102 and 108; positions 104 and 222; positions 102, 108, and 218; or positions 104 and 108.

[0024] In some embodiments, the amino acid sequence of the AL comprises the following amino acid substitutions relative to the sequence of SEQ ID NO: 1: T102H, L104M, and G218A; L104M, L108T, and G218A; T102E, L104M, L108T, G218A, and M222L; T102S and M222L; T102H, L104M, and L219I; T102H, L104M, L108T, G218A, and M222V; T102S, L108T, and M222L; T102S, L108T, G218S, and M222L; T102E, L108T, and M222I; T102E and G218S; T102K, L104I, L108T, and M222L; T102S, L104M, and L108M; T102K, G218A, and M222T; T102S, L104M, L219I, and M222L; T102H and L108T; L104M and M222V; T102H, L104M, G218A, and M222T; T102S, L108V, and G218A; L104A, L108T, and G218A; L104V and L108T; or T102K, L108V, and M222L.

[0025] In some embodiments, the amino acid sequence of the AL comprises the following amino acid substitutions relative to the sequence of SEQ ID NO: 1: T102H, L104A, and G218A; T102K, L104V, L219I, and M222V; T102K, L108V, and M222L; T102H, L108M, G218A, and M222T; T102K, L104A, and M222I; T102K and M222T; T102K and L104I; L104M and M222V; T102S, L108M, and G218S; T102E and L108M; T102E, L108M, and G218A; T102S and L108M; L102K and L108M; or L108M.

[0026] In some embodiments, the AL is a TAL. In some embodiments, the amino acid sequence of the AL comprises substitutions at positions corresponding to the following positions in the sequence of SEQ ID NO: 1: positions 104, 108, 219, and 222; positions 102, 108, 218, and 219; positions 102, 104, 108, 219, and 222; positions 102, 107, 108, 218, 219, and 222; positions 104, 108, 218, 219, and 222; positions 102, 104, 107, and 222; positions 102, 104, 107, 108, 219, and 222; positions 104, 218, and 222; positions 102, 108, 218, 219, and 222; positions 104, 108, and 218; positions 102, 107, 108, 219, and 222; positions 104, 107, 108, and 222; positions 102, 104, 108, 218, and 219; positions 102, 104, 107, 219, and 222; positions 102, 108, 218, and 222; positions 102, 108, and 222; positions 102, 104, 108, and 219; positions 102, 104, 107, 108, 218, 219, and 222; positions 102, 104, 107, 108, 218, and 219; positions 102, 107, 108, 219, and 222; positions 102, 104, 107, 108, 218, and 222; or positions 102, 104, 107, 108, and 219.

[0027] In some embodiments, the amino acid sequence of the AL comprises the following amino acid substitutions relative to the sequence of SEQ ID NO: 1: L104A, L108Q, L219I, and M222N; T102S, L108Q, G218A, and L219I; T102H, L104M, L108M, L219I, and M222L; T102E, F107Y, L108M, G218S, L219I, and M222N; L104I, L108H, G218A, L219I, and M222V; T102E, L104M, F107Y, and M222I; T102E, L104V, F107Y, L108M, L219I, and M222T; T102S, L104I, G218S, L219I, and M222V; L104V, G218A, and M222L; T102K, L108H, G218A, L219I, and M222T; L104I, L108M, and G218S; T102H, F107Y, L108M, L219I, and M222V; L104V, F107H, L108Q, and M222L; T102K, L104A, L108Q, G218A, and L219I; T102S, L104A, F107S, L219I, and M222N; T102S, L108H, G218S, and M222V; T102K, L104A, L108H, L219I, and M222N; T102S, L108H, and M222N; T102H, L104M, L108M, and L219I; T102K, L104A, F107Y, L108V, G218A, L219I, and M222N; T102H, L108M, G218S, and M222L; T102E, L104M, F107Y, L108M, G218A, and L219I; T102E, L104V, F107H, and M222N; T102H, F107H, L108M, L219I, and M222T; T102H, L104V, F107S, L108Q, G218S, and M222T; T102E, L104M, F107S, L108M, G218A, and L219I; or T102E, L104V, F107Y, L108M, and L219I. In some embodiments, the amino acid sequence of the AL comprises an amino acid sequence that has at least 90% identity to the sequence of SEQ ID NO: 1.

[0028] Aspects of the present disclosure relate to an AL, wherein the amino acid sequence of the AL comprises an amino acid substitution at a position corresponding to amino acid residue F107 relative to the sequence of SEQ ID NO: 1. In some embodiments, the amino acid sequence of the AL comprises: a histidine (H) at a position corresponding to position 107 in the sequence of SEQ ID NO: 1; a serine(S) at a position corresponding to position 107 in the sequence of SEQ ID NO: 1; a tyrosine (Y) at a position corresponding to position 107 in the sequence of SEQ ID NO: 1. In some embodiments, the amino acid sequence of the AL comprises an amino acid substitution at a position corresponding to amino acid residue 102, 104, 108, 218, 219, or 222 relative to the sequence of SEQ ID NO: 1.

[0029] In some embodiments, the AL produces more trans-cinnamic acid per unit time than an AL with an amino acid sequence comprising the sequence of SEQ ID NO: 1. In some embodiments, the AL can produce at least 10%, 20%, 30%, 40%, 50%, 60%, 70%, 80%, 90%, 100%, 200%, or 300% more trans-cinnamic acid per unit time than a AL with an amino acid sequence comprising the sequence of SEQ ID NO: 1. In some embodiments, the AL can produce at least 10%, 20%, 30%, 40%, 50%, 60%, 70%, 80%, 90%, 100%, 200%, or 300% more trans-cinnamic acid per unit time than coumarate per unit time.

[0030] In some embodiments, the AL produces more coumarate per unit time than a TAL with an amino acid sequence comprising the sequence of SEQ ID NO: 1. In some embodiments, the AL can produce at least 10%, 20%, 30%, 40%, 50%, 60%, 70%, 80%, 90%, 100%, 200%, or 300% more coumarate per unit time than a TAL with an amino acid sequence comprising the sequence of SEQ ID NO: 1. In some embodiments, the AL can produce at least 10%, 20%, 30%, 40%, 50%, 60%, 70%, 80%, 90%, 100%, 200%, or 300% more coumarate per unit time than trans-cinnamic acid per unit time.

[0031] Aspects of the present disclosure relate to a method of producing an aromatic compound, comprising contacting phenylalanine and/or tyrosine with any host cell of the present disclosure or any AL of the present disclosure. In some embodiments, the method comprises contacting phenylalanine. In some embodiments, the method comprises contacting tyrosine.

[0032] In some embodiments, the aromatic compound is a flavor or fragrance compound. In some embodiments, the aromatic compound is a phenylpropanoid. In some embodiments, the aromatic compound is a sweetener. In some embodiments, the aromatic compound is a flavonoid. In some embodiments, the aromatic compound is a flavanone. In some embodiments, the aromatic compound is eriodictyol or a glycoside and/or alkoxy derivative thereof. In some embodiments, the aromatic compound is hesperetin. In some embodiments, the aromatic compound is a dihydrochalcone. In some embodiments, the aromatic compound is hesperetin dihydrochalcone 4′-O-glucoside (HDG). In some embodiments, the aromatic compound is vanillin. In some embodiments, the aromatic compound is an hydroxycinnamic acid or a derivative thereof. In some embodiments, the hydroxycinnamic acid or the derivative thereof is coumaric acid, ferulic acid, sinapic acid, caffeic acid, chlorogenic acid, or rosmarinic acid. In some embodiments, the aromatic compound is ferulic acid.

[0033] Aspects of the present disclosure relate to a method of improving an aromatic compound manufacturing mixture, comprising contacting the mixture with any of the ALs described in the present disclosure. In some embodiments, the method is a method of improving a flavor or fragrance manufacturing mixture. In some embodiments, the aromatic compound manufacturing mixture comprises a shikimate pathway product. In some embodiments, the shikimate pathway product comprises: chorismate, prephenate, phenylpyruvate, hydroxyphenylpyruvate, phenylalanine, or tyrosine. In some embodiments, improving comprises converting phenylalanine to trans-cinnamic acid. In some embodiments, improving comprises converting tyrosine to coumarate. In some embodiments, improving comprises promoting production of an aromatic compound. In some embodiments, the method occurs in vitro.

[0034] Each of the limitations of the invention can encompass various embodiments of the invention. It is, therefore, anticipated that each of the limitations of the invention involving any one element or combinations of elements can be included in each aspect of the invention. This invention is not limited in its application to the details of construction and the arrangement of components set forth in the following description or illustrated in the drawings. The invention is capable of other embodiments and of being practiced or of being carried out in various ways. Also, the phraseology and terminology used in this disclosure is for the purpose of description and should not be regarded as limiting. The use of “including,” “comprising,” or “having,” “containing,” “involving,” and variations of thereof in this disclosure, is meant to encompass the items listed thereafter and equivalents thereof as well as additional items. As used in this specification and the appended claims, the singular forms “a,” “an” and “the” include plural referents unless the content clearly dictates otherwise.

### BRIEF DESCRIPTION OF THE DRAWINGS

[0035] The following drawings form part of the present specification and are included to further demonstrate certain aspects of the present disclosure, which may be better understood by reference to one or more of these drawings in combination with the detailed description of specific embodiments presented in this disclosure. The accompanying drawings are not intended to be drawn to scale. The drawings are illustrative only and are not required for enablement of the disclosure. For purposes of clarity, not every component may be labeled in every drawing. In the drawings:

[0036] FIG. 1 is a schematic showing the metabolic pathway upstream of the PAL and TAL substrates described herein.

[0037] FIG. 2 is a schematic showing the reaction catalyzed by PAL and TAL enzymes.

[0038] FIG. 3 is a graph showing data from a secondary screen described in Example 1 of strains expressing a protein engineering library containing variant PALs that included amino acid substitutions relative to the wild-type PAL from Anabaena variabilis (AvPAL; UniProKB Accession No. Q3M5Z3; SEQ ID NO: 1). A strain expressing wild-type AvPAL was included as a positive control. A strain expressing GFP was included as a negative control. The Y-axis shows the kinetic absorbance measurements collected at 290 nm per minute for each strain on the X-axis.

[0039] FIG. 4 is a graph showing data from a secondary screen described in Example 2 of a protein engineering library described in Example 1, screened for TAL activity. The Y-axis shows the whole cell assay tCA (mM) concentration normalized to the OD600 of the culture for each strain on the X-axis. The data show the plotting of biological triplicates. A strain expressing wild-type AvPAL was included as a positive control (called “avPAL positive control”). A strain expressing GFP was included as a negative control. A strain expressing RsTAL was also included as a positive control (called “rsTAL positive control”).

### DETAILED DESCRIPTION OF THE INVENTION

[0040] The present disclosure provides, in some aspects, engineered enzymes that are capable of enhanced aromatic amino acid processing, e.g., phenylalanine and/or tyrosine processing. These enzymes include phenylalanine ammonia lyases (PALs), which are phenylalanine converting enzymes that catalyze a reaction converting L-phenylalanine to ammonia and trans-cinnamic acid, tyrosine ammonia lyases (TALs), which are tyrosine converting enzymes that catalyze a reaction converting L-tyrosine to ammonia and p-coumaric acid, and enzymes capable of processing both phenylalanine and tyrosine. An enzyme that is capable of converting L-phenylalanine to ammonia and trans-cinnamic acid and/or converting L-tyrosine to ammonia and p-coumaric acid is referred to herein as an aromatic amino acid ammonia lyase (also referred to herein as an AL). In some embodiments, an AL is a PAL. In some embodiments, an AL is a TAL. In some embodiments, an AL is a PAL and a TAL. Accordingly, the disclosure provides, in some aspects, ALs, PALs, and TALs.

[0041] The disclosed enzymes and host cells comprising such enzymes may be used to promote reactions that use phenylalanine and/or tyrosine as substrates, e.g., to produce increased quantities of aromatic compounds including, for example, trans-cinnamic acid and/or p-coumaric acid, and may also be used in other industrial settings. For example, in the flavor and fragrance industries, aromatic compounds (e.g., trans-cinnamic acid and p-coumaric acid) are sought after due to their desirable flavor and fragrance characteristics. The disclosure is directed, in part, to the discovery of AL enzymes capable of processing phenylalanine and/or tyrosine to increase biosynthesis of trans-cinnamic acid and/or p-coumaric acid, nucleic acids encoding the same, and host cells capable of expressing AL enzymes, e.g., to produce increased quantities of trans-cinnamic acid and/or p-coumaric acid.

[0042] Aromatic Compounds Aspects of the disclosure are useful for the production of aromatic compounds. As used in this disclosure, the term “aromatic compound” refers to a compound that comprises a phenyl group. The aromatic compounds of this disclosure can be produced by enzymatic activity or metabolism from products of the shikimate pathway, e.g., aromatic compound precursors (e.g., chorismate and prephenate), and/or other aromatic compounds (e.g., coumarate), either in vitro or in vivo. Aromatic compounds have numerous clinical and industrial uses including production of antioxidants, cosmetics, perfumes, UV screens, and anticancer, anti-viral, anti-inflammatory, wound healing, and antibacterial agents. In some embodiments, an aromatic compound is a flavor or fragrance compound that can be produced by enzymatic activity or metabolism from products of the shikimate pathway.

[0043] Aromatic compounds include, but are not limited to: glucosinolates, coumarins, isothiocyanates, ubiquinons, lignins, lignans, stilbenoids, flavonoids (e.g., condensed tanins, proanthocyanides, or anthyocyanins), C6 aromatic-C2 compounds (e.g., 2-phenylethanol, phenylacetaldehyde, or phenylacetonitrile), benzeneoids (e.g., benzyl alcohol, methyl benzoate, or benzyl benzoate), phenylpropanoids (e.g., eugenol, methyl eugenol, chavicol, and isoeugenol), and any other polyphenolic compounds useful in flavor or fragrance applications. In some embodiments, the aromatic compound is a flavonoid. In some embodiments, the aromatic compound is a flavanone. In some embodiments, the aromatic compound is eriodictyol, homoeriodictyol, or sterubin, or a glycoside or alkoxy derivative of any thereof (e.g., eriocitrin). In some embodiments, an aromatic compound is naringenin, naringin, or hesperetin. In some embodiments, an aromatic compound is a hesperetin glycoside, e.g., hesperetin 7-O-glycoside (also known as hesperidin). In some embodiments, an aromatic compound comprises a dihydrochalcone group, e.g., a substituted dihydrochalcone, e.g., a hesperetin dihydrochalcone, e.g., neohesperidin dihydrochalcone or hesperetin dihydrochalcone. In some embodiments, the aromatic compound is a hesperetin dihydrochalcone O-glucoside (e.g., hesperetin dihydrochalcone 4′-O-glucoside (HDG)). In some embodiments, the aromatic compound is vanillin. In some embodiments, the aromatic compound is raspberry ketone. In some embodiments, the aromatic compound is methyl cinnamate. In some embodiments, the aromatic compound is naringin. In some embodiments, the aromatic compound is ferulic acid. In some embodiments, an aromatic compound is naturally occurring, e.g., is produced by a naturally occurring cell. In some embodiments, an aromatic compound is synthetic.

[0044] In some embodiments, an aromatic compound is a phenylpropanoid. As used in this disclosure, “phenylpropanoids” are compounds comprising an aromatic ring and (i) a three-carbon substituted or unsubstituted propene or substituted or unsubstituted propenylene tail, wherein the propene or propenylene tail is attached to the aromatic ring or (ii) a three-carbon substituted or unsubstituted propane or substituted or unsubstituted propanylene tail, wherein the propane or propanylene tail is attached to the aromatic ring. Non-limiting examples of phenylpropanoids include hydroxycinnamic acids and derivatives thereof, flavonoids, flavanones, and phenylpropanoid glycosides. In some embodiments, a phenylpropanoid is hesperetin, eriodictyol dihydrochalcone, hesperetin dihydrochalcone 4′-O-glucoside (HDG), trans-cinnamic acid, or coumarate.

[0045] In some embodiments, a phenylpropanoid is a hydroxycinnamic acid. Hydroxycinnamic acids are compounds that comprise an aromatic ring and a propenoic acid attached to the aromatic ring. Hydroxycinnamic acids are known to those of skill in the art and are generally composed of a carbon backbone that varies in length from C6 to C3 with a variety of substituents such as caffeic acid, chlorogenic acid, and quinic acid. These organic compounds are hydroxy derivatives of cinnamic acid. Non-limiting examples of hydroxycinnamic acids include m-coumaric acid, o-coumaric acid, p-coumaric acid, caffeic acid, ferulic acid, and sinapic acid. In some embodiments, a hydroxycinnamic acid derivative is an ester, amide, or hydrazide derivative of an hydroxycinnamic acid. For example, rosmarinic acid is an ester derivative of caffeic acid and chlorogenic acids are ester derivatives of hydroxycinnamic acids with quinic acid. In some embodiments, a chlorogenic acid is 3-caffeoylquinic acid.

[0046] In some embodiments, a hydroxycinnamic acid or derivative thereof is m-coumaric acid, o-coumaric acid, p-coumaric acid, caffeic acid, ferulic acid, sinapic acid, rosmarinic acid, or a chlorogenic acid.

[0047] In some embodiments, a hydroxycinnamic acid or a derivative thereof is a compound of Formula (1):

[chemical structure]

wherein:
[0048] R¹ is H, OH, OCH₃, CH₃, or OCH₂COOH;
[0049] R² is H, OH, OCH₃, CH₂CH═C(CH₃)₂, CO(CH₂)₂Ph, CH₂CH═C(CH₃)CH₂OH, COOH, 3,4-[—OCH₂O—], NH₂, Br, C(CH₃)₃, OCH₂COOH, NO₂, CH₃, or γ,γ-dimethylallyl;
[0050] R³ is H, OH, CH₂CH═C(CH₃)₂, CO(CH₂)₂Ph, CH₂CH═C(CH₃)CH₂OH, OCH₂COOH, N(CH₃)₂, OCH₃, CHO, NO₂, Cl, NH₂, SO₃H, CH₃, or Oac; and
[0051] R⁴ is H, OCH₃, Br, C(CH₃)₃, OH, or NO₂, provided that at least one of R¹—R⁴ is OH.

[0052] The abbreviation “Ph” represents a phenyl group.

[0053] In some embodiments, a hydroxycinnamic acid derivative is a compound of Formula (2):

[chemical structure]

wherein:
[0054] R¹ is —OH, —OCH₃, or halogen;
[0055] R² is allyl, 1-naphthylmethyl, CH₂CH₂Ph, 3,4-dihydroxyphenethyl, 2-phenoxyethyl, 2-hydroxyethyl, tetradecyl, hexadecyl; octadecyl, hexylEt, CH₃, 3-phenylprop-2-en-1-yl, 4-allyl-2,6-dimethoxyphenyl, CH₂Ph; CH₂ CH₂CH(CH₃)₂, phenethyl, 2-(1-naftyl)-ethyl; 2-(2-naftyl)-ethyl, CH₂COOH, CH(CH₃) COOH, bornyl, i-Pr, or Bu; and
[0056] n is 1, 2, 3, 4, or 5.

[0057] The abbreviation “Et” represents an ethyl group.

[0058] The abbreviation “Pr” represents a propyl group.

[0059] The abbreviation “i-Pr” represents an isopropyl group.

[0060] The abbreviation “Bu” represents a butyl group.

[0061] In some embodiments, a hydroxycinnamic acid derivative is a compound of Formula (3):

[chemical structure]

wherein:
[0062] R¹ is —OH, —OCH₃, i-Pr, —O-isopentenyl, geranyl, —O-geranyl, —NO₂, 3,4-(O—CH₂—O), or halogen;
[0063] R² is 2-(3-methoxy-4-hydroxyphenyl)-ethyl, 2-(4-hydroxyphenyl)-ethyl, hexyl, H, NH₃, 3-methylbut-2-enyl, OH, OMe, OEt, i-Pr, i-Bu, isopentyl, allyl, Ph, 2-OH-Ph, 3-OH-Ph, 4-OH-Ph, Bn, phenethyl, pyrollidinyl, piperidinyl, morpholinyl, (CH₃)₂, dopaminyl, N-(2-(4-hydroxyphenyl)ethyl)-N-methyl, 2-(3,4-dihydroxyphenyl)-ethyl, NH₂, 2-NO₂-Ph, 2,4-diNO₂-Ph, 2-Cl-Ph, 3-Cl-Ph, 4-Cl-Ph, 4-OMe-Ph, 2-CH₃-Ph, N(CH₃)₂, N(Et)₂, N(C₂H₄OH)₂, i-PrNH, n-Bu, NHNH₂, NHCOPh, NHCOPy, 2-(N-acetylamino)-ethyl, NH-(pyridine-2-yl), NH(CH₂)₂-(indole-3-yl), NHR²: Gly; Ala; Val; Phe; Tyr; or 3′,4′-diOH-Phe, NHR²: Gly; or Val, NHR²: L-Val-OMe; L-Leu-OMe; L-Phe-t-Bu; L-Tyr-OMe; or L-Phe (4-F-Ph)-Me, or NHR²: L-Tyr-OMe; L-Phe (4-F-Ph)-Me; or L-Phe-t-Bu. See also, e.g., Sova et al., Mini Rev Med Chem. 2012 July; 12(8):749-67; and
[0064] n is 1, 2, 3, 4, or 5.

[0065] The abbreviation “Me” represents a methyl group.

[0066] The abbreviation “Bn” represents a benzyl group.

[0067] Hydroxycinnamic acids and their derivatives have numerous clinical and industrial applications including use in production of flavoring agents, fragrances, antioxidants, antivirals, antibacterials, and antifungals. As a non-limiting example, hydroxycinnamic acids, including caffeic, ferulic, and chlorogenic acid have been shown to have antioxidant properties and can act as superoxide anion scavengers. Chlorogenic acids have also been used as antioxidants and anti-inflammatory compounds for treatment of numerous diseases including cardiovascular disease, type 2 diabetes and Alzheimer's disease. Cinnamates, which are hydroxycinnamic acid derivatives, have also been found to contribute to the antioxidative effects of white wine. Trans-cinnamic acid can be used for producing flavors, dyes and pharmaceuticals. p-coumaric acid is a precursor of many phenolic compounds and its conjugates are of interest due to their antioxidant, anti-cancer, antimicrobial, antivirus, anti-inflammatory, antiplatelet aggregation, anxiolytic, antipyretic, analgesic, and anti-arthritis properties. See also, e.g., Sova et al., Mini Rev Med Chem. 2012 July; 12(8):749-67.

### Phenylalanine Ammonia Lyases (PALs)

[0068] In some embodiments, an AL is a PAL (i.e., it is an enzyme capable of converting L-phenylalanine to ammonia and trans-cinnamic acid). As used in this disclosure, a “phenylalanine ammonia lyase” or “(PAL)” refers to an enzyme that catalyzes the conversion of L-phenylalanine to ammonia and trans-cinnamic acid (FIG. 2). In some embodiments, a PAL is a L-phenylalanine converting enzyme. Naturally occurring PALs, along with tyrosine ammonia lyases (TALs), and histidine ammonia lyases (HALs), are members of the aromatic amino acid lyase family of enzymes. Such enzymes are characterized by the presence of a co-factor (4-methyldiene-imidazol-5-one (MIO)) in their active sites, formed in naturally occurring PALs by autocatalytic cyclization and dehydration of an internal tri-peptide segment (e.g., an Ala-Ser-Gly). PALs are found in a variety of microorganisms (e.g., cyanobacteria, bacteria (e.g., actinobacteria), and extremophiles), fungi (e.g., yeast), plants, and protists (e.g., algae), and are central to the phenylpropanoid pathway of plants, but do not naturally occur in mammalian animals such as humans. The phenylpropanoid pathway transforms aromatic amino acids produced from carbon sources in the shikimate pathway into a variety of different aromatic compounds. Naturally occurring PALs produce trans-cinnamic acid from L-phenylalanine, which can then be further processed by downstream enzymes such as, e.g., cinnamate 4-hydroxylase, 4-coumarate-coenzyme A ligase, chalcone synthase, or flavonol synthase (FIG. 1). Naturally occurring PALs can have different substrate and/or product specificities; for example, PALs from dicotyledonous plants predominantly deaminate L-phenylalanine to ammonia and trans-cinnamic acid, whereas PALs from yeast and some monocot plants (e.g., maize) are known to convert L-phenylalanine and L-tyrosine to trans-cinnamic acid and p-coumaric acid, respectively. In a given plant species, multiple PAL-encoding genes may be found, increasing the number of naturally occurring PAL isoforms available for engineering. PAL enzymes occur as tetramers, with naturally occurring tetramers having molecular weights of about 64-478 kDa; heterotetramers of different naturally occurring PAL isoforms have been observed.

[0069] An AL of the disclosure that is a PAL can use L-phenylalanine as a substrate. In some embodiments, an AL, e.g., a PAL, exhibits specificity for L-phenylalanine compared to other amino acids (e.g., compared to L-tyrosine or L-histidine). In some embodiments, a PAL produces ammonia and trans-cinnamic acid from L-phenylalanine. In some embodiments, an AL, e.g., a PAL, predominantly consumes L-phenylalanine relative to one or more other amino acids; e.g., may consume L-phenylalanine at a rate at least 1.1-fold, 1.2-fold, 1.3-fold, 1.4-fold, 1.5-fold, 2-fold, 2.5-fold, 3-fold, 3.5-fold, 4-fold, 4.5-fold, 5-fold, 5.5-fold, or 6-fold higher (e.g., 2-fold to 6-fold more) relative to one or more other amino acids (e.g., relative to L-tyrosine or L-histidine). In some embodiments, an AL can convert L-tyrosine into ammonia and p-coumaric acid. In some embodiments, an AL can convert L-histidine into ammonia and urocanic acid.

[0070] In some embodiments, an AL (e.g., a PAL) comprises aromatic, alkyl, and/or hydrophobic amino acids at one or both positions corresponding to position 107 and/or 108 in SEQ ID NO: 1. In some embodiments, an AL (e.g., a PAL) comprises a phenylalanine at a position corresponding to position 107 in SEQ ID NO: 1. In some embodiments, an AL (e.g., that is a PAL) comprises an aromatic, alkyl, and/or hydrophobic amino acid at a position corresponding to position 107 in SEQ ID NO: 1. In some embodiments, an AL (e.g., a PAL) comprises a leucine at a position corresponding to position 108 in SEQ ID NO: 1. In some embodiments, an AL (e.g., that is a PAL) comprises an aromatic, alkyl, and/or hydrophobic amino acid at a position corresponding to position 108 in SEQ ID NO: 1.

[0071] Without wishing to be bound by theory, the disclosure is directed, in part, to the idea that residues at positions corresponding to 107 and 108 of SEQ ID NO: 1 form a part of the active site of an AL, and that the presence of hydrophobic and/or packing (e.g., planar) amino acid side chains at these positions may preferentially stabilize phenylalanine (relative to tyrosine) in the active site, while the presence of polar side and/or packing amino acid side chains at these positions may preferentially stabilize tyrosine (relative to phenylalanine) in the active site. Such preferential stabilization may influence the specific activity of the AL for phenylalanine or tyrosine substrates. Accordingly, in some embodiments, an AL (e.g., a TAL) comprises aromatic, alkyl, and/or hydrophobic amino acids at positions corresponding to position 107 and/or 108 in SEQ ID NO: 1. In some embodiments, an AL comprises one or more amino acid substitutions replacing one or both of the naturally occurring amino acids at the positions corresponding to 107 and/or 108 in SEQ ID NO: 1 with aromatic, alkyl, and/or hydrophobic amino acids (e.g., that do not naturally occur at those sites), e.g., to preferentially process phenylalanine relative to tyrosine or to maintain preferential processing of phenylalanine relative to tyrosine.

[0072] In some embodiments, an AL, e.g., a PAL, is capable of assembling into a multimer (e.g., in a host cell). In some embodiments, a PAL is capable of assembling into a tetramer (e.g., in a host cell). The disclosure is further directed, in part, to a fusion polypeptide comprising a plurality of PALs, wherein the plurality of PALs is capable of multimerizing, e.g., with each other. In some embodiments, the fusion polypeptide comprising a plurality of PALs comprises 2, 3, 4, 5, 6, 7, or 8 PALs or functional fragments thereof. In some embodiments, the fusion polypeptide comprises a plurality of PALs wherein each PAL comprises the same amino acid sequence or is derived from either: naturally occurring PALs from the same organism, or the same naturally occurring PAL isoform. In some embodiments, the fusion polypeptide comprises a plurality of PALs comprising a first PAL and a second PAL, wherein the amino acid sequence of the first PAL is different from the amino acid sequence of the second PAL. In some embodiments, the fusion polypeptide comprises a plurality of PALs wherein each PAL is derived from a naturally occurring PAL from a different organism, or from different naturally occurring PAL isoforms from the same organism. As used in this context, derived includes making one or more alterations to the amino acid sequence of a naturally occurring PAL (e.g., a deletion (e.g., truncation), insertion, or substitution).

[0073] In some embodiments, an AL, e.g., a PAL, exhibits product inhibition, which refers to an inverse relationship between product (e.g., trans-cinnamic acid) concentration and the rate of the AL's production of product (e.g., trans-cinnamic acid) and/or consumption of substrate (e.g., L-phenylalanine). In some embodiments, an AL (e.g., a PAL) does not exhibit product inhibition or does not exhibit product inhibition with respect to PAL activity. In some embodiments, the amino acid sequence of a PAL comprises one or more modifications relative to a corresponding wildtype sequence that alter (e.g., decrease or eliminate) product inhibition. In some embodiments, an AL, e.g., a PAL, exhibits downstream product inhibition, which refers to an inverse relationship between a downstream product concentration and the rate of production of a product of the AL (e.g., trans-cinnamic acid) and/or consumption of substrate (e.g., L-phenylalanine). In some embodiments, a downstream product is any compound produced by an enzyme downstream of PAL in a metabolic pathway, e.g., the phenylpropanoid pathway. The downstream product may be produced by said metabolic pathway in a non-host cell (e.g., a cell comprising a naturally occurring PAL from which a PAL of the disclosure was derived), but the downstream product may be present in a host cell regardless of the presence of the metabolic pathway in the host cell. For example, a PAL may exhibit downstream product inhibition in a host cell from a downstream product of the phenylpropanoid pathway, because the downstream product is present in the host cell despite the absence of one or more components of the phenylpropanoid pathway.

[0074] In some embodiments, a downstream product includes, but is not limited to: p-coumarate, p-coumaroyl CoA, a stilbene, an isoflavonoid, a flavonol, a flavonol glycoside, caffeate, caffeic acid, methyl caffeic acid, ferulic acid, sinapic acid, a monolignol (e.g., p-coumaryl alcohol, coniferyl alcohol, or sinapyl alcohol), hesperetin dihydrochalcone 4′-O-glucoside (HDG), vanillin, vanillic acid, raspberry ketone, methyl cinnamate, naringenin and/or naringin, or derivatives thereof.

[0075] In some embodiments, a downstream product includes, but is not limited to: hydroxybenzalacetone, narirutin, phloretin, phloridzin, liquiritgenin, (2S)-flavanone, 2-hydroxy-flavanone, 7,4′-dihydroxyflavanone, 2-hydroxy-isoflavanone, formononetin, biochanin, 2′-hydroxy-formononetin, 4-coumaroyl-CoA, apigenin, chalconaringenin, daidzein, daidzin, malonyldaidzein (MGD), dihydrodaidzein, dihydrodaidzein-sulfate, O-desmethylangolensin, 6-OH—O-desmethylangolensin, tetrahydrodaidzein, equol, equol-7-glucuronide, equol-4′-sulfate, 5-hydroxy equol, hippuric acid, 4-hydroxybenzoic acid, 2,6-dimethoxy benzoic acid, fumaric acid, 4-ethylphenol, glutaric acid, 2-phenylpropionic acid, gallic acid, resorcinolsulfate, disometin, chrysoeriol, chrysoeriol-4′-glucuronide, chrysoeriol-7-glucuronide, coumestrol, eriodictyol, dihydroquercetin, genistein, genistin, malonylgenistin (MGG), glycitein, isorhamnetin, kaempferol, laricitrin, luteolin, luteolin-3′-glucuronide, luteolin-4′-glucuronide, morin, myricetin, tetramethylated myricetin, 3,5-dihydroxyphenylacetic acid, 3,4,5-trihydroxyphenylacetic acid, methylated myricetin, myricetin monoglucuronide, myricetin diglucuronide, dimethylated myricetin, pentahydroxy-flavanone, dihydromyricetin, 2R,3S,4S-flavan-3-ol, (+)-Afzelechin, (+)-catechin, (+)-galocatechin, proanthocyanidin, (−)-epiafzelechin, (−)-eoicatechin, (−)-epigallocatechin, taxifolin, dihydroquercetin, aromadendrin, dihydrokaempferol, dihydroquercetin, dihydroflavonol, quercetin, isoquercetin, rutin, peonidin, syringetin, tetrahydroxychalcone, trangeretin, chalcone, 6′-deoxychalcone, isoliquiritigenin, tetraketide, DHK, leuco-pelargonidin, pelargonidin, a pelargonidin-based anthocyanin, DHQ, leuco-cyanidin, cyanidin, a cyanidin-based anthocyanin, DHM, leuco-delphinidin, delphinidin, a delphidin-based anthocyanin, petunidin, malvidin, flavonol, flavone, flavanone, isoflavone, isoflavanone, and/or anthocyanin, or derivatives thereof.

[0076] In some embodiments, a downstream product includes, but is not limited to: cinnamate, methylcinnamate, cinnamoyl-CoA, cinnamaldehyde, styrene, pinocembrin chalcone, pinocembrin, chrysin, baicalein, curcumin, and/or bismethoxy curcumin, or derivatives thereof.

[0077] In some embodiments, a PAL does not exhibit downstream product inhibition. In some embodiments, the amino acid sequence of a PAL comprises one or more modifications relative to a corresponding wildtype sequence that alter (e.g., decrease or eliminate) downstream product inhibition.

[0078] In some embodiments, an AL, e.g., a PAL, capable of assembling into a multimer exhibits negative cooperativity with respect to binding and/or catalyzing conversion of L-phenylalanine. In some embodiments, an AL, e.g., a PAL, capable of assembling into a multimer does not exhibit negative cooperativity with respect to binding and/or catalyzing conversion of L-phenylalanine. In some embodiments, the amino acid sequence of a PAL comprises one or more modifications relative to a corresponding wildtype sequence that alter (e.g., decrease or eliminate) negative cooperativity. In some embodiments, a fusion polypeptide comprising a plurality of ALs, e.g., PALs, comprises PALs that do not exhibit negative cooperativity with respect to binding and/or catalyzing conversion of L-phenylalanine.

[0079] In some embodiments, an AL is a PAL from Anabaena variabilis (AvPAL) or a variant thereof (e.g., described herein). In some embodiments, a host cell comprises a PAL from Anabaena variabilis (AvPAL).

[0080] The Anabaena variabilis PAL is provided by SEQ ID NO: 1, which corresponds to the sequence provided by UniProtKB Accession No. Q3M5Z3 (expressed in strain t888841 described in the Examples):

MKTLSQAQSKTSSQQFSFTGNSSANVIIGNQKLTINDVARVARNGTLVSL
INNTDILQGIQASCDYINNAVESGEPIYGVTSGFGGMANVAISREQASEL
QTNLVWFLKTGAGNKLPLADVRAAMLLRANSHMRGASGIRLELIKRMEIF
LNAGVTPYVYEFGSIGASGDLVPLSYITGSLIGLDPSFKVDENGKEMDAP
TALRQLNLSPLTLLPKEGLAMMNGTSVMTGIAANCVYDTQILTAIAMGVH
ALDIQALNGTNQSFHPFIHNSKPHPGQLWAADQMISLLANSQLVRDELDG
KHDYRDHELIQDRYSLRCLPQYLGPIVDGISQIAKQIEIEINSVTDNPLI
DVDNQASYHGGNFLGQYVGMGMDHLRYYIGLLAKHLDVQIALLASPEFSN
GLPPSLLGNRERKVNMGLKGLQICGNSIMPLLTFYGNSIADREPTHAEQF
NQNINSQGYTSATLARRSVDIFQNYVAIALMFGVQAVDLRTYKKTGHYDA
RACLSPATERLYSAVRHVVGQKPTSDRPYIWNDNEQGLDEHIARISADIA
AGGVIVQAVQDILPCLH

[0081] A non-limiting example of a nucleotide sequence encoding SEQ ID NO: 1 is provided by SEQ ID NO: 2:

atgaaaacactgtcccaagcacagtcgaagacgagtagccagcagttttc
tttcaccggtaattctagcgctaacgtgattatcggcaaccagaaactaa
ctatcaacgacgtcgcccgcgttgctcggaacgggaccttagtaagcctg
actaacaacactgatatacttcaaggcattcaggcgtcctgtgattatat
caataacgcagttgagtctggtgaaccaatttacggtgtgacctcaggct
tcggcggtatggcgaacgttgctatcagccgtgaacaggcctccgaactg
caaaccaatttggtatggtttctgaaaactggtgctgggaacaaactccc
tttggcggacgtacgtgcagcaatgctgctgcgcgccaactcgcatatgc
gtggcgcgtccggtatccgtctggagctgatcaaacgtatggaaatcttc
ttgaacgctggtgttactccgtacgtttatgaatttggatctatcggcgc
ttctggagatctggtcccgctgagctacattacgggttccctgattggcc
ttgacccgagcttcaaggtggatttcaacggcaaagaaatggacgccccg
accgcgttacgccagttaaatctgtctcccctgacacttctgcctaaaga
aggtctagctatgatgaatgggacctcagtcatgactggcatcgcagcta
actgcgtatacgacacccagatcctgactgcgattgcaatgggtgttcac
gctctggatatccaggccctgaacggcaccaaccagtctttccacccgtt
tatccataactctaagccgcacccaggtcagctgtgggcggctgatcaga
tgatatcattgctggctaactcgcaactggtacgggacgagctggacggc
aaacatgattaccgcgaccacgagctgatccaggatcgttatagcctgcg
ttgccttccgcagtacctgggtccgattgtggacggtatctcacagatag
caaaacaaatcgaaattgaaattaactccgttactgataaccctctgatt
gacgtcgataaccaggcgtcgtaccacggcggaaatttcctgggtcagta
tgttggcatgggtatggaccaccttcgctactatatcggcctgctggcga
aacacctggatgtgcagattgcgctgctagctagtcccgaatttagcaac
ggactgccgccatctttattgggcaaccgtgaacgtaaggttaacatggg
tctgaaaggtttacaaatctgtggcaattccatcatgccgctgctgacgt
tctacggcaatagcatcgccgaccgctttccgacccatgcagagcaattc
aaccagaatatcaactctcagggctacacctccgcaacgctggcgcgacg
tagtgttgatatcttccaaaactacgttgcgattgccctgatgtttggcg
tccaggctgtagacctgaggacttataaaaagactggccattacgatgcg
cgtgcttgcctctctccggctaccgaacgcctgtattccgccgtgcgtca
cgtagttggtcagaaacctacttcagatcgcccatacatctggaacgata
acgagcagggtctggatgaacacatcgctcgcatctccgctgacattgcc
gctggcggagtaattgttcaagctgtacaggatatcctgccgtgcctgca
c

### Pal Variants for Increased Production of Trans-Cinnamic Acid

[0082] As described in Example 1, variant ALs that contain one or more amino acid substitutions relative to AvPAL (SEQ ID NO: 1) were identified in this disclosure that were capable of producing increased amounts of trans-cinnamic acid relative to AvPAL (SEQ ID NO: 1). Past efforts to improve AL activity have focused on improving in vivo AL activity via PEG-ylation of the AL (Hydery, T. and Coppenrath, V. A. (2019) “A Comprehensive Review of Pegvaliase, an Enzyme Substitution Therapy for the Treatment of Phenylketonuria”, Drug Target Insights). Aspects of the present disclosure relate to improvement of AL enzymatic activity to increase amounts of trans-cinnamic acid relative to a parent AL. The surprising and unexpected findings described in the present disclosure, including in Example 1, may lead to improved production of phenylpropanoid pathway products.

[0083] In some embodiments, an AL, e.g., a PAL, associated with the disclosure comprises at least 1, at least 2, at least 3, at least 4, at least 5, at least 6, at least 7, at least 8, at least 9, at least 10, at least 11, at least 12, at least 13, at least, at least 15, at least 16, at least 17, at least 18, at least 19, at least 20, at least 21, at least 22, at least 23, at least 24, at least 25, at least 26, at least 27, at least 28, at least 29, at least 30, at least 31, at least 32, at least 33, at least 34, at least 35, at least 36, at least 37, at least 38, at least 39, at least 40, at least 41, at least 42, at least 43, at least 44, at least 45, at least 46, at least 47, at least 48, at least 49, at least 50, at least 60, at least 70, at least 80, at least 90, or at least 100 amino acid substitutions, deletions, insertions, or additions relative to SEQ ID NO: 1.

[0084] In some embodiments, a host cell that expresses a heterologous polynucleotide encoding an AL, e.g., a PAL, may increase conversion of L-phenylalanine to trans-cinnamic acid by 1.1-fold, 1.2-fold, 1.3-fold, 1.4-fold, 1.5-fold, 2-fold, 2.5-fold, 3-fold, 3.5-fold, 4-fold, 4.5-fold, 5-fold, 5.5-fold, or 6-fold more (e.g., 2-fold to 6-fold more) relative to a control. In some embodiments, the control is a host cell that expresses a heterologous polynucleotide encoding SEQ ID NO: 1.

[0085] In some embodiments, an AL, e.g., a PAL, comprises an amino acid sequence, or is encoded by a nucleic acid sequence, that is at least 5%, at least 10%, at least 15%, at least 20%, at least 25%, at least 30%, at least 35%, at least 40%, at least 45%, at least 50%, at least 55%, at least 60%, at least 65%, at least 70%, at least 71%, at least 72%, at least 73%, at least 74%, at least 75%, at least 76%, at least 77%, at least 78%, at least 79%, at least 80%, at least 81%, at least 82%, at least 83%, at least 84%, at least 85%, at least 86%, at least 87%, at least 88%, at least 89%, at least 90%, at least 91%, at least 92%, at least 93%, at least 94%, at least 95%, at least 96%, at least 97%, at least 98%, at least 99%, or is 100% identical to any one of SEQ ID NOs: 1, 5-28, and 198-221, an amino acid or polynucleotide sequence of a PAL in Table 5, or a PAL otherwise described in this disclosure. In some embodiments, the amino acid sequence of an AL, e.g., a PAL, comprises or consists of any one of SEQ ID NOs: 1, 3, or 5-28 or a conservatively substituted version thereof.

[0086] In some embodiments, the sequence of an AL, e.g., a PAL, associated with the disclosure comprises one or more amino acid substitutions relative to SEQ ID NO: 1, wherein at least one of the amino acid substitutions is at a position corresponding to position 102, 104, 107, 108, 218, 219 and/or 222 in SEQ ID NO: 1.

[0087] In some embodiments, an AL, e.g., a PAL, comprises: a serine(S) at a position corresponding to position 102 in the sequence of SEQ ID NO: 1; a glutamic acid (E) at a position corresponding to position 102 in the sequence of SEQ ID NO: 1; a lysine (K) at a position corresponding to position 102 in the sequence of SEQ ID NO: 1; a histidine (H) at a position corresponding to position 102 in the sequence of SEQ ID NO: 1; a methionine (M) at a position corresponding to position 104 in the sequence of SEQ ID NO: 1; an alanine (A) at a position corresponding to position 104 in the sequence of SEQ ID NO: 1; an isoleucine (I) at a position corresponding to position 104 in the sequence of SEQ ID NO: 1; a valine (V) at a position corresponding to position 104 in the sequence of SEQ ID NO: 1; a histidine (H) at a position corresponding to position 107 in the sequence of SEQ ID NO: 1; a serine(S) at a position corresponding to position 107 in the sequence of SEQ ID NO: 1; a tyrosine (Y) at a position corresponding to position 107 in the sequence of SEQ ID NO: 1; a histidine (H) at a position corresponding to position 108 in the sequence of SEQ ID NO: 1; a threonine (T) at a position corresponding to position 108 in the sequence of SEQ ID NO: 1; a valine (V) at a position corresponding to position 108 in the sequence of SEQ ID NO: 1; a glutamine (Q) at a position corresponding to position 108 in the sequence of SEQ ID NO: 1; a methionine (M) at a position corresponding to position 108 in the sequence of SEQ ID NO: 1; an alanine (A) at a position corresponding to position 218 in the sequence of SEQ ID NO: 1; a serine(S) at a position corresponding to position 218 in the sequence of SEQ ID NO: 1; an isoleucine (I) at a position corresponding to position 219 in the sequence of SEQ ID NO: 1; a leucine (L) at a position corresponding to position 222 in the sequence of SEQ ID NO: 1; an asparagine (N) at a position corresponding to position 222 in the sequence of SEQ ID NO: 1; an isoleucine (I) at a position corresponding to position 222 in the sequence of SEQ ID NO: 1; a valine (V) at a position corresponding to position 222 in the sequence of SEQ ID NO: 1; a threonine (T) at a position corresponding to position 222 in the sequence of SEQ ID NO: 1; and/or any combination thereof.

[0088] In some embodiments, an AL, e.g., a PAL, comprises substitutions at: positions 102, 104, and 218 in the sequence of SEQ ID NO: 1; positions 104, 108, and 218 in the sequence of SEQ ID NO: 1; positions 102, 104, 108, 218, and 222 in the sequence of SEQ ID NO: 1; positions 102 and 222 in the sequence of SEQ ID NO: 1; positions 102, 104, and 219 in the sequence of SEQ ID NO: 1; positions 102, 108, and 222 in the sequence of SEQ ID NO: 1; positions 102, 108, 218, and 222 in the sequence of SEQ ID NO: 1; positions 102 and 218 in the sequence of SEQ ID NO: 1; positions 102, 104, 108, and 222 in the sequence of SEQ ID NO: 1; positions 102, 104, and 108 in the sequence of SEQ ID NO: 1; positions 102, 218, and 222 in the sequence of SEQ ID NO: 1; positions 102, 104, 219, and 222 in the sequence of SEQ ID NO: 1; positions 102 and 108 in the sequence of SEQ ID NO: 1; positions 104 and 222 in the sequence of SEQ ID NO: 1; positions 102, 108, and 218 in the sequence of SEQ ID NO: 1; or positions 104 and 108.

[0089] In some embodiments, an AL, e.g., a PAL, comprises the following amino acid substitutions relative to the sequence of SEQ ID NO: 1: T102H, L104M, and G218A; L104M, L108T, and G218A; T102E, L104M, L108T, G218A, and M222L; T102S and M222L; T102H, L104M, and L219I; T102H, L104M, L108T, G218A, and M222V; T102K and G218A; T102S, L108T, and M222L; T102S, L108T, G218S, and M222L; T102E, L108T, and M222I; T102E and G218S; T102K, L104I, L108T, and M222L; T102S, L104M, and L108M; T102K, G218A, and M222T; T102S, L104M, L219I, and M222L; T102H and L108T; L104M and M222V; T102H, L104M, G218A, and M222T; T102S, L108V, and G218A; L104A, L108T, and G218A; L104V and L108T; or T102K, L108V, and M222L.

[0090] In some embodiments, a host cell that expresses a heterologous polynucleotide encoding an AL, e.g., a PAL, may exhibit at least 1.1-fold, 1.2-fold, 1.3-fold, 1.4-fold, 1.5-fold, 2-fold, 2.5-fold, 3-fold, 3.5-fold, 4-fold, 4.5-fold, 5-fold, 5.5-fold, or 6-fold more (e.g., 2-fold to 6-fold more) more activity on L-phenylalanine relative to other amino acids. In some embodiments, a host cell that expresses a heterologous polynucleotide encoding an AL, e.g., a PAL, may exhibit at least 1.1-fold, 1.2-fold, 1.3-fold, 1.4-fold, 1.5-fold, 2-fold, 2.5-fold, 3-fold, 3.5-fold, 4-fold, 4.5-fold, 5-fold, 5.5-fold, or 6-fold more (e.g., 2-fold to 6-fold more) more activity on L-phenylalanine relative to other amino acids.

### Tyrosine Ammonia Lyases (TALs)

[0091] As described in Example 2, variant ALs were surprisingly identified in this disclosure that were active on L-tyrosine to produce p-coumaric acid. In some embodiments, an AL, including a variant AL associated with the disclosure, may be referred to as a “tyrosine ammonia lyase” or “TAL.” As used in this disclosure, a “tyrosine ammonia lyase” or “TAL” refers to an enzyme that catalyzes the conversion of L-tyrosine to ammonia and coumaric acid (FIG. 2). In some embodiments, a TAL is a L-tyrosine converting enzyme. Like other members of the aromatic amino acid lyase family of enzymes, naturally occurring TALs are characterized by the presence of a co-factor (4-methyldiene-imidazol-5-one (MIO)) in their active sites, formed in naturally occurring TALs by autocatalytic cyclization and dehydration of an internal tri-peptide segment (e.g., an Ala-Ser-Gly). TALs are found in a variety of microorganisms (e.g., cyanobacteria, bacteria (e.g., actinobacteria), and extremophiles), fungi (e.g., yeast), plants, and protists (e.g., algae), and are central to the phenylpropanoid pathway of plants, but do not naturally occur in mammalian animals such as humans. The phenylpropanoid pathway transforms aromatic amino acids produced from carbon sources in the shikimate pathway into a variety of different aromatic compounds; naturally occurring TAL produces coumaric acid from L-tyrosine, which can then be further processed by downstream enzymes such as, e.g., 4-coumarate-coenzyme A ligase, chalcone synthase, or flavonol synthase (FIG. 1). Naturally occurring TALs can have different substrate and/or product specificities; some predominantly deaminate L-tyrosine to ammonia and p-coumaric acid, whereas PALs from yeast and some monocot plants (e.g., maize) are known to convert L-phenylalanine and L-tyrosine to trans-cinnamic acid and p-coumaric acid, respectively. In a given plant species, multiple TAL-encoding genes may be found, increasing the number of naturally occurring TAL isoforms available for engineering. TAL enzymes occur as tetramers, with naturally occurring tetramers having molecular weights of about 64-478 kDa; heterotetramers of different naturally occurring TAL isoforms have been observed.

[0092] An AL of the disclosure that is a TAL can use L-tyrosine as a substrate. In some embodiments, an AL, e.g., a TAL, exhibits specificity for L-tyrosine compared to other amino acids (e.g., compared to L-phenylalanine or L-histidine). In some embodiments, a TAL produces ammonia and p-coumaric acid from L-tyrosine. In some embodiments, an AL, e.g., a TAL, predominantly consumes L-tyrosine relative to one or more other amino acids; e.g., may consume L-tyrosine at a rate at least 1.1-fold, 1.2-fold, 1.3-fold, 1.4-fold, 1.5-fold, 2-fold, 2.5-fold, 3-fold, 3.5-fold, 4-fold, 4.5-fold, 5-fold, 5.5-fold, or 6-fold higher (e.g., 2-fold to 6-fold more) relative to one or more other amino acids (e.g., relative to L-phenylalanine or L-histidine). In some embodiments, an AL can convert L-phenylalanine into ammonia and trans-cinnamic acid. In some embodiments, an AL can convert L-histidine into ammonia and urocanic acid.

[0093] In some embodiments, an AL is selective for tyrosine (i.e., the AL is a TAL) when the phenylalanine residue at a position corresponding to position 107 in SEQ ID NO: 1 is substituted for a tyrosine and/or the leucine residue at a position corresponding to position 108 in SEQ ID NO: 1 is substituted for a histidine. Without wishing to be bound by any theory, substitutions at one or both of these residues may be involved in converting a PAL into a TAL. A phenylalanine residue at a position corresponding to position 107 in SEQ ID NO: 1 and/or a leucine residue at a position corresponding to position 108 of SEQ ID NO: 1 in a PAL may be more likely to effectively interact with the phenyl ring of L-phenylalanine, while a tyrosine residue at a position corresponding to position 107 in SEQ ID NO: 1 and/or a histidine residue at a position corresponding to position 108 of SEQ ID NO: 1 may be able to form hydrogen bonds with the hydroxyl functional group on L-tyrosine.

[0094] In some embodiments, an AL (e.g., a TAL) comprises an amino acid substitution at a position corresponding to position 107 and/or 108 in SEQ ID NO: 1. In some embodiments, an AL (e.g., a TAL) comprises a tyrosine at a position corresponding to position 107 in SEQ ID NO: 1. In some embodiments, an AL (e.g., that is a TAL) comprises an F107Y amino acid substitution relative to the sequence of SEQ ID NO: 1. In some embodiments, an AL (e.g., a TAL) comprises a histidine at a position corresponding to position 108 in SEQ ID NO: 1. In some embodiments, an AL (e.g., a TAL) comprises an L108H amino acid substitution relative to the sequence of SEQ ID NO: 1. In some embodiments, an AL (e.g., a TAL) comprises an amino acid substitution at a position corresponding to position 107 and/or 108 in SEQ ID NO: 1, wherein the substitution(s) replace one or both of the naturally occurring amino acids with polar and/or packing amino acids, e.g., to preferentially process tyrosine relative to phenylalanine.

[0095] In some embodiments, an AL, e.g., a TAL, is capable of assembling into a multimer (e.g., in a host cell). In some embodiments, a TAL is capable of assembling into a tetramer (e.g., in a host cell). The disclosure is further directed, in part, to a fusion polypeptide comprising a plurality of TALs, wherein the plurality of TALs is capable of multimerizing, e.g., with each other. In some embodiments, the fusion polypeptide comprising a plurality of TALs comprises 2, 3, 4, 5, 6, 7, or 8 TALs or functional fragments thereof. In some embodiments, the fusion polypeptide comprises a plurality of TALs wherein each TAL comprises the same amino acid sequence or is derived from either: naturally occurring TALs from the same organism, or the same naturally occurring TAL isoform. In some embodiments, the fusion polypeptide comprises a plurality of TALs comprising a first TAL and a second TAL, wherein the amino acid sequence of the first TAL is different from the amino acid sequence of the second TAL. In some embodiments, the fusion polypeptide comprises a plurality of TALs wherein each TAL is derived from a naturally occurring TAL from a different organism, or from different naturally occurring TAL isoforms from the same organism. As used in this context, derived includes making one or more alterations to the amino acid sequence of a naturally occurring TAL (e.g., a deletion (e.g., truncation), insertion, or substitution).

[0096] In some embodiments, an AL, e.g., a TAL, exhibits product inhibition, which refers to an inverse relationship between product (e.g., coumaric acid) concentration and the rate of the AL's production of product (e.g., coumaric acid) and/or consumption of substrate (e.g., L-tyrosine). In some embodiments, an AL, e.g., a TAL, does not exhibit product inhibition or does not exhibit product inhibition with respect to TAL activity. In some embodiments, the amino acid sequence of a TAL comprises one or more modifications relative to a corresponding wildtype sequence that alter (e.g., decrease or eliminate) product inhibition. In some embodiments, an AL, e.g., a TAL, exhibits downstream product inhibition, which refers to an inverse relationship between a downstream product concentration and the rate of production of a product of the AL (e.g., coumaric acid) and/or consumption of a substrate (e.g., L-tyrosine). In some embodiments, a downstream product is any compound produced by an enzyme downstream of TAL in a metabolic pathway, e.g., the phenylpropanoid pathway. The downstream product may be produced by said metabolic pathway in a non-host cell (e.g., a cell comprising a naturally occurring TAL from which a TAL of the disclosure was derived), but the downstream product may be present in a host cell regardless of the presence of the metabolic pathway in the host cell. For example, a TAL may exhibit downstream product inhibition in a host cell from a downstream product of the phenylpropanoid pathway, because the downstream product is present in the host cell despite the absence of one or more components of the phenylpropanoid pathway.

[0097] In some embodiments, a downstream product includes, but is not limited to: p-coumaroyl CoA, a stilbene, an isoflavonoid, a flavonol, a flavonol glycoside, caffeate, caffeic acid, methyl caffeic acid, ferulic acid, sinapic acid, or a monolignol (e.g., p-coumaryl alcohol, coniferyl alcohol, or sinapyl alcohol), p-coumaryl-CoA, dihydrocoumaroyl-CoA, phloretin, 3-hydroxyphloretin, hesperetin dihydrochalcone, or hesperetin dihydrochalcone 4′-O-glucoside (HDG), vanillin, vanillic acid, raspberry ketone, naringenin and/or naringin, or derivatives thereof.

[0098] In some embodiments, a downstream product includes, but is not limited to: hydroxybenzalacetone, narirutin, phloretin, phloridzin, liquiritgenin, (2S)-flavanone, 2-hydroxy-flavanone, 7,4′-dihydroxyflavanone, 2-hydroxy-isoflavanone, formononetin, biochanin, 2′-hydroxy-formononetin, 4-coumaroyl-CoA, apigenin, chalconaringenin, daidzein, daidzin, malonyldaidzein (MGD), dihydrodaidzein, dihydrodaidzein-sulfate, O-desmethylangolensin, 6-OH—O-desmethylangolensin, tetrahydrodaidzein, equol, equol-7-glucuronide, equol-4′-sulfate, 5-hydroxy equol, hippuric acid, 4-hydroxybenzoic acid, 2,6-dimethoxy benzoic acid, fumaric acid, 4-ethylphenol, glutaric acid, 2-phenylpropionic acid, gallic acid, resorcinolsulfate, disometin, chrysoeriol, chrysoeriol-4′-glucuronide, chrysoeriol-7-glucuronide, coumestrol, eriodictyol, dihydroquercetin, genistein, genistin, malonylgenistin (MGG), glycitein, isorhamnetin, kaempferol, laricitrin, luteolin, luteolin-3′-glucuronide, luteolin-4′-glucuronide, morin, myricetin, tetramethylated myricetin, 3,5-dihydroxyphenylacetic acid, 3,4,5-trihydroxyphenylacetic acid, methylated myricetin, myricetin monoglucuronide, myricetin diglucuronide, dimethylated myricetin, pentahydroxy-flavanone, dihydromyricetin, 2R,3S,4S-flavan-3-ol, (+)-Afzelechin, (+)-catechin, (+)-galocatechin, proanthocyanidin, (−)-epiafzelechin, (−)-eoicatechin, (−)-epigallocatechin, taxifolin, dihydroquercetin, aromadendrin, dihydrokaempferol, dihydroquercetin, dihydroflavonol, quercetin, isoquercetin, rutin, peonidin, syringetin, tetrahydroxychalcone, trangeretin, chalcone, 6′-deoxychalcone, isoliquiritigenin, tetraketide, DHK, leuco-pelargonidin, pelargonidin, a pelargonidin-based anthocyanin, DHQ, leuco-cyanidin, cyanidin, a cyanidin-based anthocyanin, DHM, leuco-delphinidin, delphinidin, a delphidin-based anthocyanin, petunidin, malvidin, flavonol, flavone, flavanone, isoflavone, isoflavanone, and/or anthocyanin, or derivatives thereof.

[0099] In some embodiments, a TAL does not exhibit downstream product inhibition. In some embodiments, a TAL does exhibit downstream product inhibition. In some embodiments, the amino acid sequence of a TAL comprises one or more modifications relative to a corresponding wildtype sequence that alter (e.g., decrease or eliminate) downstream product inhibition.

[0100] In some embodiments, an AL, e.g., a TAL, capable of assembling into a multimer exhibits negative cooperativity with respect to binding and/or catalyzing conversion of L-tyrosine. In some embodiments, an AL, e.g., a TAL, capable of assembling into a multimer does not exhibit negative cooperativity with respect to binding and/or catalyzing conversion of L-tyrosine. In some embodiments, the amino acid sequence of a TAL comprises one or more modifications relative to a corresponding wildtype sequence that alter (e.g., decrease or eliminate) negative cooperativity. In some embodiments, a fusion polypeptide comprising a plurality of ALs, e.g., TALs, comprises TALs that do not exhibit negative cooperativity with respect to binding and/or catalyzing conversion of L-tyrosine.

AL Variants with TAL Activity for Increased Production of Coumarate

[0101] As discussed above, Example 2 describes the surprising identification of variant ALs that were active on L-tyrosine to produce p-coumaric acid.

[0102] In some embodiments, an AL, e.g., a TAL, comprises at least 1, at least 2, at least 3, at least 4, at least 5, at least 6, at least 7, at least 8, at least 9, at least 10, at least 11, at least 12, at least 13, at least, at least 15, at least 16, at least 17, at least 18, at least 19, at least 20, at least 21, at least 22, at least 23, at least 24, at least 25, at least 26, at least 27, at least 28, at least 29, at least 30, at least 31, at least 32, at least 33, at least 34, at least 35, at least 36, at least 37, at least 38, at least 39, at least 40, at least 41, at least 42, at least 43, at least 44, at least 45, at least 46, at least 47, at least 48, at least 49, at least 50, at least 60, at least 70, at least 80, at least 90, or at least 100 amino acid substitutions, deletions, insertions, or additions relative to SEQ ID NO: 1.

[0103] In some embodiments, a host cell that expresses a heterologous polynucleotide encoding an AL, e.g., a TAL, may increase conversion of L-tyrosine to p-coumaric acid by 1.1-fold, 1.2-fold, 1.3-fold, 1.4-fold, 1.5-fold, 2-fold, 2.5-fold, 3-fold, 3.5-fold, 4-fold, 4.5-fold, 5-fold, 5.5-fold, or 6-fold more (e.g., 2-fold to 6-fold more) relative to a control. In some embodiments, the control is a host cell that expresses a heterologous polynucleotide encoding SEQ ID NO: 1.

[0104] In some embodiments, an AL, e.g., a TAL, comprises an amino acid sequence, or is encoded by a nucleic acid sequence, that is at least 5%, at least 10%, at least 15%, at least 20%, at least 25%, at least 30%, at least 35%, at least 40%, at least 45%, at least 50%, at least 55%, at least 60%, at least 65%, at least 70%, at least 71%, at least 72%, at least 73%, at least 74%, at least 75%, at least 76%, at least 77%, at least 78%, at least 79%, at least 80%, at least 81%, at least 82%, at least 83%, at least 84%, at least 85%, at least 86%, at least 87%, at least 88%, at least 89%, at least 90%, at least 91%, at least 92%, at least 93%, at least 94%, at least 95%, at least 96%, at least 97%, at least 98%, at least 99%, or is 100% identical to any one of SEQ ID NOs: 1-4, 29-197, or 222-388, an amino acid or polynucleotide sequence of a TAL in Table 5, or a TAL otherwise described in this disclosure. In some embodiments, the amino acid sequence of an AL, e.g., a TAL, comprises or consists of any one of SEQ ID NOs: 29-195 or a conservatively substituted version thereof.

[0105] In some embodiments, the sequence of an AL, e.g., a TAL, associated with the disclosure comprises one or more amino acid substitutions relative to SEQ ID NO: 1, wherein at least one of the amino acid substitutions is at a position corresponding to position 102, 104, 107, 108, 218, 219 and/or 222 in SEQ ID NO: 1.

[0106] In some embodiments, an AL, e.g., a TAL, comprises: a glutamic acid (E) at a position corresponding to position 102 in the sequence of SEQ ID NO: 1; a histidine (H) at a position corresponding to position 102 in the sequence of SEQ ID NO: 1; a lysine (K) at a position corresponding to position 102 in the sequence of SEQ ID NO: 1; a serine(S) at a position corresponding to position 102 in the sequence of SEQ ID NO: 1; an alanine (A) at a position corresponding to position 104 in the sequence of SEQ ID NO: 1; an isoleucine (I) at a position corresponding to position 104 in the sequence of SEQ ID NO: 1; a methionine (M) at a position corresponding to position 104 in the sequence of SEQ ID NO: 1; a valine (V) at a position corresponding to position 104 in the sequence of SEQ ID NO: 1; a histidine (H) at a position corresponding to position 107 in the sequence of SEQ ID NO: 1; a serine(S) at a position corresponding to position 107 in the sequence of SEQ ID NO: 1; a tyrosine (Y) at a position corresponding to position 107 in the sequence of SEQ ID NO: 1; a histidine (H) at a position corresponding to position 108 in the sequence of SEQ ID NO: 1; a methionine (M) at a position corresponding to position 108 in the sequence of SEQ ID NO: 1; a glutamine (Q) at a position corresponding to position 108 in the sequence of SEQ ID NO: 1; a threonine (T) at a position corresponding to position 108 in the sequence of SEQ ID NO: 1; a valine (V) at a position corresponding to position 108 in the sequence of SEQ ID NO: 1; an alanine (A) at a position corresponding to position 218 in the sequence of SEQ ID NO: 1; a serine(S) at a position corresponding to position 218 in the sequence of SEQ ID NO: 1; an isoleucine (I) at a position corresponding to position 219 in the sequence of SEQ ID NO: 1; an isoleucine (I) at a position corresponding to position 222 in the sequence of SEQ ID NO: 1; a leucine (L) at a position corresponding to position 222 in the sequence of SEQ ID NO: 1; an asparagine (N) at a position corresponding to position 222 in the sequence of SEQ ID NO: 1; a threonine (T) at a position corresponding to position 222 in the sequence of SEQ ID NO: 1; a valine (V) at a position corresponding to position 222 in the sequence of SEQ ID NO: 1.

[0107] In some embodiments, an AL, e.g., a TAL, comprises substitutions at: positions 104, 108, 219, and 222 in the sequence of SEQ ID NO: 1; positions 102, 108, 218, and 219 in the sequence of SEQ ID NO: 1 positions 102, 104, 108, 219, and 222 in the sequence of SEQ ID NO: 1; positions 102, 107, 108, 218, 219, and 222 in the sequence of SEQ ID NO: 1; positions 104, 108, 218, 219, and 222 in the sequence of SEQ ID NO: 1; positions 102, 104, 107, and 222 in the sequence of SEQ ID NO: 1; positions 102, 104, 107, 108, 219, and 222 in the sequence of SEQ ID NO: 1; positions 104, 218, and 222 in the sequence of SEQ ID NO: 1; positions 102, 108, 218, 219, and 222 in the sequence of SEQ ID NO: 1; positions 104, 108, and 218 in the sequence of SEQ ID NO: 1; positions 102, 107, 108, 219, and 222 in the sequence of SEQ ID NO: 1; positions 104, 107, 108, and 222 in the sequence of SEQ ID NO: 1; positions 102, 104, 108, 218, and 219 in the sequence of SEQ ID NO: 1; positions 102, 104, 107, 219, and 222 in the sequence of SEQ ID NO: 1; positions 102, 108, 218, and 222 in the sequence of SEQ ID NO: 1; positions 102, 108, and 222 in the sequence of SEQ ID NO: 1; positions 102, 104, 108, and 219 in the sequence of SEQ ID NO: 1; positions 102, 104, 107, 108, 218, 219, and 222 in the sequence of SEQ ID NO: 1; positions 102, 104, 107, 108, 218, and 219 in the sequence of SEQ ID NO: 1; positions 102, 107, 108, 219, and 222 in the sequence of SEQ ID NO: 1; positions 102, 104, 107, 108, 218, and 222 in the sequence of SEQ ID NO: 1; or positions 102, 104, 107, 108, and 219 in the sequence of SEQ ID NO: 1.

[0108] In some embodiments, an AL, e.g., a TAL, comprises the following amino acid substitutions relative to the sequence of SEQ ID NO: 1: L104A, L108Q, L219I, and M222N; T102S, L108Q, G218A, and L219I; T102H, L104M, L108M, L219I, and M222L; T102E, F107Y, L108M, G218S, L219I, and M222N; L104I, L108H, G218A, L219I, and M222V; T102E, L104M, F107Y, and M222I; T102E, L104V, F107Y, L108M, L219I, and M222T; T102S, L104I, G218S, L219I, and M222V; L104V, G218A, and M222L; T102K, L108H, G218A, L219I, and M222T; L104I, L108M, and G218S; T102H, F107Y, L108M, L219I, and M222V; L104V, F107H, L108Q, and M222L; T102K, L104A, L108Q, G218A, and L219I; T102S, L104A, F107S, L219I, and M222N; T102S, L108H, G218S, and M222V; T102K, L104A, L108H, L219I, and M222N; T102S, L108H, and M222N; T102H, L104M, L108M, and L219I; T102K, L104A, F107Y, L108V, G218A, L219I, and M222N; T102H, L108M, G218S, and M222L; T102E, L104M, F107Y, L108M, G218A, and L219I; T102E, L104V, F107H, and M222N; T102H, F107H, L108M, L219I, and M222T; T102H, L104V, F107S, L108Q, G218S, and M222T; T102E, L104M, F107S, L108M, G218A, and L219I; or T102E, L104V, F107Y, L108M, and L219I.

[0109] In some embodiments, an AL, e.g., a TAL, comprises the following amino acid substitutions relative to the sequence of SEQ ID NO: 1: T102E, L104V, F107Y, and L108H; T102E, F107Y, L108H, G218A, and M222I; T102S, F107Y, L108H, G218A, and M222T; T102E, L104M, F107Y, L108H, and G218A; L219I and M222T; F107Y, L108H, L219I, and M222T; L104A, L108Q, L219I, and M222N; T102S, L108Q, G218A, and L219I; T102H, L104M, L108M, and L219I; M222L; T102E, F107Y, L108M, and G218S; L219I and M222N; L104I, L108H, G218A, and L219I; M222V; T102E, L104M, F107Y, and M222I; T102E, F107Y, L108H, and M222I; T102E, F107Y, L108H, and G218A; T102S, F107Y, and L108H; T102E, F107Y, L108H, and M222T; or T102E, F107Y, L108H, and L219I.

[0110] In some embodiments, a host cell that expresses a heterologous polynucleotide encoding an AL, e.g., a TAL, may exhibit at least 1.1-fold, 1.2-fold, 1.3-fold, 1.4-fold, 1.5-fold, 2-fold, 2.5-fold, 3-fold, 3.5-fold, 4-fold, 4.5-fold, 5-fold, 5.5-fold, or 6-fold more (e.g., 2-fold to 6-fold more) more activity on L-tyrosine relative to other amino acids.

### Variants

[0111] Aspects of the disclosure relate to polynucleotides encoding any of the polypeptides, such as ALs (e.g., PALs and/or TALs), associated with the disclosure. Variants of polynucleotide or polypeptide sequences described in this application are also encompassed by the present disclosure. As used in this disclosure, a “variant” polynucleotide refers to a polynucleotide for which the nucleic acid sequence differs from the nucleic acid sequence of a reference polynucleotide by one or more changes in the nucleic acid sequence. As used in this disclosure, a “variant” polypeptide refers to a polypeptide for which the amino acid sequence differs from the amino acid sequence of a reference polypeptide by one or more changes in the amino acid sequence.

[0112] A variant polynucleotide or polypeptide can be constructed synthetically. Typically, the polynucleotide or polypeptide from which a variant is derived is a wild-type polynucleotide, a wild-type polypeptide, or a wild-type polynucleotide or polypeptide domain. However, the variants usable in the present disclosure may also be derived from homologs, orthologs, or paralogs of a wild-type polynucleotide, a wild-type polypeptide, or a wild-type polynucleotide or polypeptide domain, or from synthetic polynucleotides or polypeptides. The changes in the nucleic acid and/or amino acid sequences may include substitutions, insertions, deletions, N-terminal truncations, C-terminal truncations, N-terminal additions, C-terminal additions, or any combination of these changes, which may occur at one or multiple positions.

[0113] A variant may share at least 5%, at least 10%, at least 15%, at least 20%, at least 25%, at least 30%, at least 35%, at least 40%, at least 45%, at least 50%, at least 55%, at least 60%, at least 65%, at least 70%, at least 71%, at least 72%, at least 73%, at least 74%, at least 75%, at least 76%, at least 77%, at least 78%, at least 79%, at least 80%, at least 81%, at least 82%, at least 83%, at least 84%, at least 85%, at least 86%, at least 87%, at least 88%, at least 89%, at least 90%, at least 91%, at least 92%, at least 93%, at least 94%, at least 95%, at least 96%, at least 97%, at least 98%, at least 99%, or 100% sequence identity with a reference sequence, including all values in between.

[0114] Unless otherwise noted, the term “sequence identity” refers to the relatedness of the sequences of two polypeptides or polynucleotides when the sequences are aligned, and the term “percent identity” refers to the percentage of residues (amino acids or nucleotides) that are identical when two or more polypeptide or polynucleotide sequences are aligned. In some embodiments, sequence identity and/or percent identity is determined across the entire length of a sequence, while in other embodiments, sequence identity and/or percent identity is determined over a region of a sequence.

[0115] Percent identity of polypeptide or polynucleotide sequences can be calculated by any of the methods known to one of ordinary skill in the art. For example, percent identity can be determined using the algorithm of Karlin and Altschul Proc. Natl. Acad. Sci. USA 87:2264-68, 1990, modified as in Karlin and Altschul Proc. Natl. Acad. Sci. USA 90:5873-77, 1993. Such an algorithm is incorporated into the NBLAST® and XBLAST® programs (version 2.0) of Altschul et al., J. Mol. Biol. 215:403-10, 1990. BLAST® protein searches can be performed, for example, with the XBLAST program, score=50, wordlength=3. Where gaps exist between two sequences, Gapped BLAST® can be utilized, for example, as described in Altschul et al., Nucleic Acids Res. 25 (17): 3389-3402, 1997. When utilizing BLAST® and Gapped BLAST® programs, the default parameters of the respective programs (e.g., XBLAST® and NBLAST®) can be used, or the parameters can be adjusted appropriately as would be understood by one of ordinary skill in the art.

[0116] A second example of a local alignment technique is based on the Smith-Waterman algorithm (Smith, T. F. & Waterman, M. S. (1981) “Identification of common molecular subsequences.” J. Mol. Biol. 147:195-197). An example of a global alignment technique is the Needleman-Wunsch algorithm (Needleman, S. B. & Wunsch, C. D. (1970) “A general method applicable to the search for similarities in the amino acid sequences of two proteins.” J. Mol. Biol. 48:443-453), which is based on dynamic programming. A further example of a global alignment technique is the Fast Optimal Global Sequence Alignment Algorithm (FOGSAA).

[0117] In some embodiments, the identity of two polypeptide sequences is determined by aligning the two amino acid sequences of the polypeptides, calculating the number of identical amino acids, and dividing by the length of one of the polypeptide sequences. In some embodiments, the identity of two polynucleotide sequences is determined by aligning the two nucleotide sequences of the polynucleotides, calculating the number of identical nucleotides and dividing by the length of one of the polynucleotide sequences.

[0118] For multiple sequence alignments, computer programs including Clustal Omega (Sievers et al., Mol Syst Biol. 2011 Oct. 11; 7:539) may be used.

[0119] In preferred embodiments, a sequence, including a nucleic acid or amino acid sequence, is found to have a specified percent identity to a reference sequence, such as a sequence disclosed in this application and/or recited in the claims when sequence identity is determined using the algorithm of Karlin and Altschul Proc. Natl. Acad. Sci. USA 87:2264-68, 1990, modified as in Karlin and Altschul Proc. Natl. Acad. Sci. USA 90:5873-77, 1993 (e.g., BLAST®, NBLAST®, XBLAST® or Gapped BLAST® programs, using default parameters of the respective programs).

[0120] In some embodiments, a sequence, including a nucleic acid or amino acid sequence, is found to have a specified percent identity to a reference sequence, such as a sequence disclosed in this application and/or recited in the claims when sequence identity is determined using the Smith-Waterman algorithm (Smith, T. F. & Waterman, M. S. (1981) “Identification of common molecular subsequences.” J. Mol. Biol. 147:195-197) or the Needleman-Wunsch algorithm (Needleman, S. B. & Wunsch, C. D. (1970) “A general method applicable to the search for similarities in the amino acid sequences of two proteins.” J. Mol. Biol. 48:443-453).

[0121] In some embodiments, a sequence, including a nucleic acid or amino acid sequence, is found to have a specified percent identity to a reference sequence, such as a sequence disclosed in this application and/or recited in the claims when sequence identity is determined using a Fast Optimal Global Sequence Alignment Algorithm (FOGSAA).

[0122] In some embodiments, a sequence, including a nucleic acid or amino acid sequence, is found to have a specified percent identity to a reference sequence, such as a sequence disclosed in this application and/or recited in the claims when sequence identity is determined using Clustal Omega (Sievers et al., Mol Syst Biol. 2011 Oct. 11; 7:539).

[0123] Functional variants of ALs, PALs, TALs, and any other proteins disclosed in this application are also encompassed by the present disclosure. As used in this disclosure, a functional variant of an AL, PAL, or a TAL refers to an AL, PAL, or TAL that has a different sequence than the sequence of a reference AL, PAL, or TAL but that maintains, partially or fully, at least one activity of the reference AL, PAL, or TAL. In some embodiments, a functional variant of an AL, PAL, or TAL enhances one or more activities of a reference AL, PAL, or TAL. For example, a functional variant may bind one or more of the same substrates (e.g., phenylalanine, tyrosine, or precursors thereof) or produce one or more of the same products (e.g., trans-cinnamic acid or p-coumaric acid).

[0124] Variant sequences, including functional variants, may be homologous sequences. Homologous sequences include but are not limited to paralogous sequences, orthologous sequences, or sequences arising from convergent evolution. Paralogous sequences arise from duplication of a gene within a genome of a species, while orthologous sequences diverge after a speciation event. Two different species may have evolved independently but may each comprise a sequence that shares a certain percent identity with a sequence from the other species as a result of convergent evolution. As used in this disclosure, a functional homolog of a reference AL, PAL, or TAL maintains, partially or fully, at least one activity of the reference AL, PAL, or TAL. In some embodiments, a functional homolog of an AL, PAL, or TAL enhances one or more activities of a reference AL, PAL, or TAL. For example, a functional homolog may bind one or more of the same substrates (e.g., phenylalanine, tyrosine, or precursors thereof) or produce one or more of the same products (e.g., trans-cinnamic acid or p-coumaric acid).

[0125] Functional variants may be variants of naturally occurring sequences. Functional variants can also be created via site-directed mutagenesis of the coding sequence for a polypeptide, or by combining domains from the coding sequences for different naturally-occurring polypeptides (“domain swapping”). Techniques for modifying genes encoding functional variants described in this disclosure are known in the art and include, inter alia, directed evolution techniques, site-directed mutagenesis techniques and random mutagenesis techniques, and can be useful, for example, to increase specific activity of a polypeptide, alter substrate specificity, alter expression levels, alter subcellular location, or modify polypeptide: polypeptide interactions in a desired manner.

[0126] Variants and homologs can be identified by analysis of polynucleotide and polypeptide sequence alignments. For example, performing a query on a database of polynucleotide or polypeptide sequences can identify variants and homologs of polynucleotide sequences encoding derivative polypeptides and the like.

[0127] Hybridization can also be used to identify functional variants or functional homologs and/or as a measure of homology between two polynucleotide sequences. A polynucleotide sequence encoding any of the polypeptides disclosed in this application, or a portion thereof, can be used as a hybridization probe according to standard hybridization techniques. The hybridization of a probe to DNA or RNA from a test source (e.g., a mammalian cell) is an indication of the presence of the relevant DNA or RNA in the test source. Hybridization conditions are known to those skilled in the art and can be found in, e.g., Current Protocols in Molecular Biology, John Wiley & Sons, N.Y., 6.3.1-6.3.6, 1991. In some embodiments, moderate hybridization conditions include hybridization in 2× sodium chloride/sodium citrate (SSC) at 30° C. followed by a wash in 1×SSC, 0.1% SDS at 50° C. In some embodiments, highly stringent conditions include hybridization in 6× sodium chloride/sodium citrate (SSC) at 45° C. followed by a wash in 0.2×SSC, 0.1% SDS at 65° C.

[0128] Sequence analysis to identify functional variants or functional homologs can also involve BLAST, Reciprocal BLAST, or PSI-BLAST analysis of non-redundant databases using a relevant amino acid sequence as the reference sequence. An amino acid sequence is, in some instances, deduced from a polynucleotide sequence. In some embodiments, polypeptides that have greater than 40% sequence identity may be identified as candidates for further evaluation for suitability for use according to the disclosure. Amino acid sequence similarity allows for conservative amino acid substitutions, such as substitution of one hydrophobic residue for another or substitution of one polar residue for another. If desired, manual inspection of such candidates can be carried out in order to narrow the number of candidates to be further evaluated. Manual inspection can be performed by selecting those candidates that appear to have, e.g., conserved functional domains.

[0129] In some embodiments, a polypeptide variant (e.g., AL, PAL, or TAL variant or variant of any other polypeptide associated with the disclosure) comprises a domain that shares a secondary structure (e.g., alpha helix, beta sheet) with a reference polypeptide (e.g., a reference AL, PAL, or TAL, or any other polypeptide associated with the disclosure). In some embodiments, a polypeptide variant (e.g., AL, PAL, or TAL variant or variant of any other polypeptide associated with the disclosure) shares a tertiary structure with a reference polypeptide (e.g., a reference AL, PAL, or TAL, or any other polypeptide associated with the disclosure). In some embodiments, a reference polypeptide is an AL, e.g., a PAL, comprising the sequence of SEQ ID NO: 1. As a non-limiting example, a variant polypeptide may have low primary sequence identity (e.g., less than 80%, less than 75%, less than 70%, less than 65%, less than 60%, less than 55%, less than 50%, less than 45%, less than 40%, less than 35%, less than 30%, less than 25%, less than 20%, less than 15%, less than 10%, or less than 5% sequence identity) compared to a reference polypeptide, but share one or more secondary structures (e.g., including but not limited to loops, alpha helices, or beta sheets, or have the same tertiary structure as a reference polypeptide. For example, a loop may be located between a beta sheet and an alpha helix, between two alpha helices, or between two beta sheets. Homology modeling may be used to compare two or more tertiary structures.

[0130] Mutations can be made in a nucleotide sequence by any method known to one of ordinary skill in the art. For example, mutations can be made by gene editing tools, PCR, site-directed mutagenesis (e.g., according to Kunkel, Proc. Nat. Acad. Sci. U.S.A. 82: 488-492, 1985), chemical synthesis of a gene or polypeptide, or by insertions, such as insertion of a tag (e.g., a HIS tag or a GFP tag). Mutations can include, for example, substitutions, deletions, additions, insertions, fusions, and translocations, generated by any method known in the art.

[0131] In some embodiments, methods for producing variants include circular permutation (Yu and Lutz, Trends Biotechnol. 2011 January; 29(1):18-25). In circular permutation, the linear primary sequence of a polypeptide can be circularized (e.g., by joining the N-terminal and C-terminal ends of the sequence) and the polypeptide can be severed (“broken”) at a different location. Thus, the linear primary sequence of the new polypeptide may have low sequence identity (e.g., less than 80%, less than 75%, less than 70%, less than 65%, less than 60%, less than 55%, less than 50%, less than 45%, less than 40%, less than 35%, less than 30%, less than 25%, less than 20%, less than 15%, less than 10%, less or less than 5%, including all values in between) compared to the linear sequence of the polypeptide before it was circularized and severed as determined by linear sequence alignment methods (e.g., Clustal Omega or BLAST). Topological analysis of the two polypeptides, however, may reveal that the tertiary structure of the two polypeptides is similar or dissimilar. Without being bound by a particular theory, a variant polypeptide created through circular permutation of a reference polypeptide and with a similar tertiary structure as the reference polypeptide can share similar functional characteristics (e.g., enzymatic activity, enzyme kinetics, substrate specificity or product specificity). In some instances, circular permutation may alter the secondary structure, tertiary structure or quaternary structure and produce a polypeptide with different functional characteristics (e.g., increased or decreased enzymatic activity, different substrate specificity, or different product specificity). See, e.g., Yu and Lutz, Trends Biotechnol. 2011 January; 29(1):18-25.

[0132] It should be appreciated that in a polypeptide that has undergone circular permutation, the linear amino acid sequence of the polypeptide would differ from a reference polypeptide that has not undergone circular permutation. However, one of ordinary skill in the art would be able to determine which residues in the polypeptide that has undergone circular permutation correspond to residues in the reference polypeptide that has not undergone circular permutation by, for example, aligning the sequences and detecting conserved motifs, and/or by comparing the structures or predicted structures of the polypeptides, e.g., by homology modeling.

[0133] In some embodiments, an algorithm that determines the percent identity between a sequence of interest and a reference sequence described in this application accounts for the presence of circular permutation between the sequences. The presence of circular permutation may be detected using any method known in the art, including, for example, RASPODOM (Weiner et al., Bioinformatics. 2005 Apr. 1; 21(7):932-7). In some embodiments, the presence of circulation permutation is corrected for (e.g., the domains in at least one sequence are rearranged) prior to calculation of the percent identity between a sequence of interest and a sequence described in this application. The claims of this application should be understood to encompass sequences for which percent identity to a reference sequence is calculated after taking into account potential circular permutation of the sequence.

[0134] Functional variants or functional homologs may be identified using any method known in the art. For example, the algorithm of Karlin and Altschul Proc. Natl. Acad. Sci. USA 87:2264-68, 1990 described above may be used to identify homologous proteins.

[0135] Putative functional variants or functional homologs may also be identified by searching for polypeptides with functionally annotated domains. Databases including Pfam (Sonnhammer et al., Proteins. 1997 July; 28(3):405-20) may be used to identify polypeptides with a particular domain.

[0136] Homology modeling may also be used to identify amino acid residues that are amenable to mutation without affecting function. A non-limiting example of such a method may include use of position-specific scoring matrix (PSSM) and an energy minimization protocol. See, e.g., Stormo et al., Nucleic Acids Res. 1982 May 11; 10(9):2997-3011.

[0137] PSSM may be paired with calculation of a Rosetta energy function, which determines the difference between the wild-type and a mutant, such as a point mutant. Without being bound by a particular theory, potentially stabilizing mutations can be desirable for protein engineering (e.g., production of functional homologs). In some embodiments, a potentially stabilizing mutation has a ΔΔG_{calc} value of less than −0.1 (e.g., less than −0.2, less than −0.3, less than −0.35, less than −0.4, less than −0.45, less than −0.5, less than −0.55, less than −0.6, less than −0.65, less than −0.7, less than −0.75, less than −0.8, less than −0.85, less than −0.9, less than −0.95, or less than −1.0) Rosetta energy units (R.e.u.). See, e.g., Goldenzweig et al., Mol Cell. 2016 Jul. 21; 63 (2): 337-346. doi: 10.1016/j.molcel.2016.06.012.

[0138] In some embodiments, a polynucleotide sequence encoding an AL, e.g., a PAL and/or TAL, or a polynucleotide sequence encoding any other polypeptide associated with the disclosure comprises a mutation at 1, 2, 3, 4, 5, 6, 7, 8, 9, 10, 11, 12, 13, 14, 15, 16, 17, 18, 19, 20, 21, 22, 23, 24, 25, 26, 27, 28, 29, 30, 31, 32, 33, 34, 35, 36, 37, 38, 39, 40, 41, 42, 43, 44, 45, 46, 47, 48, 49, 50, 51, 52, 53, 54, 55, 56, 57, 58, 59, 60, 61, 62, 63, 64, 65, 66, 67, 68, 69, 70, 71, 72, 73, 74, 75, 76, 77, 78, 79, 80, 81, 82, 83, 84, 85, 86, 87, 88, 89, 90, 91, 92, 93, 94, 95, 96, 97, 98, 99, 100 or more than 100 nucleotide positions corresponding to a reference sequence. In some embodiments, the polynucleotide sequence encoding the AL, e.g., PAL and/or TAL, or the polynucleotide sequence encoding any other polypeptide associated with the disclosure comprises a mutation in 1, 2, 3, 4, 5, 6, 7, 8, 9, 10, 11, 12, 13, 14, 15, 16, 17, 18, 19, 20, 21, 22, 23, 24, 25, 26, 27, 28, 29, 30, 31, 32, 33, 34, 35, 36, 37, 38, 39, 40, 41, 42, 43, 44, 45, 46, 47, 48, 49, 50, 51, 52, 53, 54, 55, 56, 57, 58, 59, 60, 61, 62, 63, 64, 65, 66, 67, 68, 69, 70, 71, 72, 73, 74, 75, 76, 77, 78, 79, 80, 81, 82, 83, 84, 85, 86, 87, 88, 89, 90, 91, 92, 93, 94, 95, 96, 97, 98, 99, 100 or more codons of a coding sequence relative to a reference coding sequence. As will be understood by one of ordinary skill in the art, a mutation within a codon may or may not change the amino acid that is encoded by the codon due to degeneracy of the genetic code. In some embodiments, the one or more mutations in the coding sequence do not alter the amino acid sequence of the coding sequence relative to the amino acid sequence of a reference polypeptide.

[0139] In some embodiments, the one or more mutations in a polynucleotide sequence encoding an AL, e.g., a PAL and/or TAL, or encoding any other polypeptide associated with the disclosure, alter the amino acid sequence of the polypeptide relative to the amino acid sequence of a reference polypeptide. In some embodiments, the one or more mutations alter the amino acid sequence of the recombinant polypeptide relative to the amino acid sequence of a reference polypeptide and alter (enhance or reduce) an activity of the polypeptide relative to the reference polypeptide.

[0140] Assays for determining and quantifying enzyme and/or enzyme variant activity are described herein and are known in the art. By way of example, enzyme and/or enzyme variant activity can be determined by incubating a purified enzyme or enzyme variant or extracts from host cells or a complete recombinant host organism that has produced the enzyme or enzyme variant with an appropriate substrate under appropriate conditions and carrying out an analysis of the reaction products (e.g., by gas chromatography (GC) or liquid chromatography (LC) analysis). Further details on enzyme and/or enzyme variant activity assays and analysis of the reaction products are provided in the Examples. These assays include producing enzyme variants in recombinant host cells.

[0141] The activity, including specific activity, of any of the enzymes described in this application may be measured using methods known in the art. As a non-limiting example, an enzyme's activity may be determined by measuring its substrate specificity, product(s) produced, the concentration of product(s) produced, or any combination thereof.

[0142] As used in this disclosure, the term “activity” means the ability of an enzyme to react with a substrate to provide a target product. The activity of an enzyme can be determined in an activity test via measuring the increase of one or more target products, the decrease of one or more substrates (or starting materials) or via measuring a combination of these parameters as a function of time. As used in this application, “specific activity” of an enzyme refers to the amount (e.g., concentration) of a particular product produced for a given amount (e.g., concentration) of the enzyme per unit time.

[0143] A “biological activity” as used in this disclosure, refers to any activity a polypeptide may exhibit, including without limitation: enzymatic activity; binding activity to another compound (e.g., binding to another polypeptide, in particular binding to a receptor, or binding to a nucleic acid); inhibitory activity (e.g., enzyme inhibitory activity); activating activity (e.g., enzyme-activating activity); or toxic effects. In some embodiments, a functional variant polypeptide exhibits the relevant activity to a degree of at least 10% of the activity of the parent or reference polypeptide.

[0144] In some embodiments, a functional variant of an enzyme associated with the present disclosure produces a better yield than a reference or parent enzyme (e.g., a wild-type enzyme or a reference enzyme variant). As used in this disclosure, the term “yield” refers to the gram of recoverable product per gram of feedstock (which can be calculated as a percent molar conversion rate).

[0145] In some embodiments, a functional variant of an enzyme associated with the present disclosure exhibits modified (e.g., increased) productivity relative to a reference or parent enzyme (e.g., a wild-type enzyme or a reference enzyme variant).

[0146] As used in this disclosure, “productivity” of a variant AL, e.g., PAL and/or TAL, refers to the fold increase in production of a desired product by the variant AL relative to the production of the desired product by a reference or parent enzyme (e.g., a wild-type enzyme or a reference enzyme variant). For example, when the desired product is trans-cinnamic acid or p-coumaric acid, then productivity of a variant AL refers to the fold increase in production of trans-cinnamic acid or p-coumaric acid by the variant AL relative to the production of trans-cinnamic acid or p-coumaric acid by a reference or parent enzyme (e.g., a wild-type enzyme or a reference enzyme variant).

[0147] In some embodiments, a functional variant of an enzyme associated with the present disclosure exhibits a modified (e.g., increased) target productivity relative to a reference or parent enzyme. The term “target productivity” refers to the amount of recoverable target product in grams per liter of fermentation capacity per hour of bioconversion time (i.e., time after the substrate was added).

[0148] In some embodiments, a functional variant of an enzyme associated with the present disclosure exhibits a modified target yield factor relative to a reference or parent enzyme. The term “target yield factor” refers to the ratio between the product concentration obtained and the concentration of the variant/derivative (for example, purified enzyme or an extract from a recombinant host cell expressing the desired enzyme) in culture medium.

[0149] In some embodiments, a functional variant of an enzyme associated with the present disclosure exhibits a modified (e.g., increased) fold in enzymatic activity relative to a reference or parent enzyme (e.g., SEQ ID NO: 1). In some embodiments, the increase in activity is by at least a factor of: 2, 3, 4, 6, 8, 10, 12, 14, 16, 18, 20, 25, 30, 35, 40, 45, 50, 55, 60, 65, 70, 75, 80, 85, 90, 95, 100 or more than 100.

[0150] In some embodiments, a functional variant of an enzyme associated with the present disclosure exhibits a modified (e.g., increased) target productivity relative to a reference or parent enzyme. The term “target productivity” refers to the amount of recoverable target product in grams per liter of fermentation capacity per hour of bioconversion time (i.e., time after the substrate was added).

[0151] Mutations in a polypeptide coding sequence may result in conservative amino acid substitutions. As used in this application, a “conservative amino acid substitution” or “conservatively substituted amino acid” refers to an amino acid substitution that does not alter the relative charge or size characteristics or functional activity of the protein in which the amino acid substitution is made.

[0152] Accordingly, as used in this disclosure, the term “conservative amino acid substitution” means an exchange of an amino acid by another amino acid listed within the same group of the six standard amino acid groups shown below.
[0153] (1) hydrophobic (non-polar): Met, Ala, Val, Leu, Ile, Gly, Pro, Trp, Phe;
[0154] (2) neutral hydrophilic: Cys, Ser, Thr; Asn, Gln, Tyr;
[0155] (3) acidic: Asp, Glu;
[0156] (4) basic: His, Lys, Arg;
[0157] (5) residues that influence chain orientation: Gly, Pro;
[0158] (6) aromatic: Trp, Tyr, Phe.

[0159] For example, the exchange of Asp by Glu retains one negative charge in the modified polypeptide. In addition, glycine and proline may be substituted for one another based on their ability to disrupt alpha-helices. Some preferred conservative substitutions within the above six groups are exchanges within the following sub-groups: (i) Ala, Val, Leu and Ile; (ii) Ser and Thr; (ii) Asn and Gln; (iv) Lys and Arg; and (v) Tyr and Phe. Given the known genetic code, and recombinant and synthetic DNA techniques, the skilled scientist readily can construct polynucleotide sequences encoding conservatively substituted amino acid variants.

[0160] As used herein, “non-conservative amino acid substitutions” or “non-conservative amino acid exchanges” are defined as exchanges of an amino acid by another amino acid listed in a different group of the six standard amino acid groups (1) to (6) as shown above. In some embodiments, variants of enzymes associated with the present disclosure are prepared using non-conservative substitutions that alter the biological function of the variants.

[0161] For ease of reference, the one-letter amino acid symbols recommended by the IUPAC-IUB Biochemical Nomenclature Commission are indicated as follows. The three letter codes are also provided for reference purposes.

TABLE 1
Amino Acid Symbols

| One Letter Code | Three Letter Code | Amino acid name |
|---|---|---|
| A | Ala | Alanine |
| C | Cys | Cysteine |
| D | Asp | Aspartic Acid |
| E | Glu | Glutamic Acid |
| F | Phe | Phenylalanine |
| G | Gly | Glycine |
| H | His | Histidine |
| I | Ile | Isoleucine |
| K | Lys | Lysine |
| L | Leu | Leucine |
| M | Met | Methionine |
| N | Asn | Asparagine |
| P | Pro | Proline |
| Q | Gln | Glutamine |
| R | Arg | Arginine |
| S | Ser | Serine |
| T | Thr | Threonine |
| V | Val | Valine |
| W | Trp | Tryptophan |
| Y | Tyr | Tyrosine |

[0162] Amino acid alterations such as amino acid substitutions may be introduced using known protocols of recombinant gene technology including PCR, gene cloning, site-directed mutagenesis of cDNA, transfection of host cells, and in-vitro transcription which may be used to introduce such changes to a sequence resulting in a variant/derivative enzyme. Variants containing amino acid alterations can be screened for functional activity.

[0163] In some instances, an amino acid is characterized by its R group (see, e.g., Table 2). For example, an amino acid may comprise a nonpolar aliphatic R group, a positively charged R group, a negatively charged R group, a nonpolar aromatic R group, or a polar uncharged R group. Non-limiting examples of an amino acid comprising a nonpolar aliphatic R group include alanine, glycine, valine, leucine, methionine, and isoleucine. Non-limiting examples of an amino acid comprising a positively charged R group includes lysine, arginine, and histidine. Non-limiting examples of an amino acid comprising a negatively charged R group include aspartate and glutamate. Non-limiting examples of an amino acid comprising a nonpolar, aromatic R group include phenylalanine, tyrosine, and tryptophan. Non-limiting examples of an amino acid comprising a polar uncharged R group include serine, threonine, cysteine, proline, asparagine, and glutamine.

[0164] Functionally equivalent variants of polypeptides may include conservative amino acid substitutions. Non-limiting examples of conservative substitutions of amino acids include substitutions made amongst amino acids within the following groups: (a) M, I, L, V; (b) F, Y, W; (c) K, R, H; (d) A, G; (e) S, T; (f) Q, N; and (g) E, D. Additional non-limiting examples of conservative amino acid substitutions are provided in Table 2.

[0165] In some embodiments, 1, 2, 3, 4, 5, 6, 7, 8, 9, 10, 11, 12, 13, 14, 15, 16, 17, 18, 19, 20 or more than 20 residues can be changed when preparing variant polypeptides. In some embodiments, amino acids are replaced by conservative amino acid substitutions.

TABLE 2
Non-limiting examples of conservative amino acid substitutions

| | | Conservative Amino |
|---|---|---|
| Original Residue | R Group Type | Acid Substitutions |
| Ala (A) | nonpolar aliphatic R group | Cys, Gly, Ser |
| Arg (R) | positively charged R group | His, Lys |
| Asn (N) | polar uncharged R group | Asp, Gln, Glu |
| Asp (D) | negatively charged R group | Asn, Gln, Glu |
| Cys (C) | polar uncharged R group | Ala, Ser |
| Gln (Q) | polar uncharged R group | Asn, Asp, Glu |
| Glu (E) | negatively charged R group | Asn, Asp, Gln |
| Gly (G) | nonpolar aliphatic R group | Ala, Ser |
| His (H) | positively charged R group | Arg, Tyr, Trp |
| Ile (I) | nonpolar aliphatic R group | Len, Met, Val |
| Leu (L) | nonpolar aliphatic R group | Ile, Met, Val |
| Lys (K) | positively charged R group | Arg, His |
| Met (M) | nonpolar aliphatic R group | Ile, Leu, Phe, Val |
| Pro (P) | polar uncharged R group | |
| Phe (F) | nonpolar aromatic R group | Met, Trp, Tyr |
| Ser (S) | polar uncharged R group | Ala, Gly, Thr |
| Thr (T) | polar uncharged R group | Ala, Asn, Ser |
| Trp (W) | nonpolar aromatic R group | His, Phe, Tyr, Met |
| Tyr (Y) | nonpolar aromatic R group | His, Phe, Trp |
| Val (V) | nonpolar aliphatic R group | Ile, Leu, Met, Thr |

[0166] In some embodiments of the disclosure, an amino acid at a particular position in a protein may be replaced by an amino acid that has a different molecular weight. For example, in some embodiments, an amino acid at a particular position in a protein may be replaced by a “larger” amino acid, which refers to an amino acid that has a larger molecular weight. In other embodiments, an amino acid at a particular position in a protein may be replaced by a “smaller” amino acid, which refers to an amino acid that has a smaller molecular weight. The amino acids, ranked from smallest to largest based on molecular weight are: G, A, S, P, V, T, C, I, L, N, D, E, K, Q, M, H, F, R, Y, and W.

[0167] Amino acid substitutions in the amino acid sequence of a polypeptide to produce a polypeptide variant having a desired property and/or activity can be made by alteration of the coding sequence of the polypeptide. Similarly, conservative amino acid substitutions in the amino acid sequence of a polypeptide to produce functionally equivalent variants of the polypeptide typically are made by alteration of the coding sequence of the polypeptide (e.g., PAL or TAL, or any other polypeptide associated with the disclosure).

### Polynucleotides Encoding ALs

[0168] Aspects of the present disclosure relate to recombinant enzymes, functional modifications and variants thereof, polynucleotides encoding said enzymes, as well as uses relating to any thereof. For example, the enzymes and cells described in this application may be used to promote L-phenylalanine and/or L-tyrosine processing, e.g., by converting L-phenylalanine to trans-cinnamic acid and/or by converting L-tyrosine to p-coumaric acid. The methods may comprise using a host cell comprising one or more enzymes disclosed in this application, a cell lysate, isolated enzymes, or any combination thereof. Methods comprising recombinant expression of polynucleotides encoding an enzyme disclosed in this application in a host cell are encompassed by the present disclosure. In vitro methods comprising reacting one or more ALs, e.g., PALs and/or TALs, in a reaction mixture disclosed in this application are also encompassed by the present disclosure.

[0169] The term “heterologous” with respect to a polynucleotide, such as a polynucleotide comprising a gene, is used interchangeably with the term “exogenous” and the term “recombinant” and refers to: a polynucleotide that has been artificially supplied to a biological system; a polynucleotide that has been modified within a biological system; or a polynucleotide whose expression or regulation has been manipulated within a biological system. A heterologous polynucleotide that is introduced into or expressed in a host cell may be a polynucleotide that comes from a different organism or species from the host cell, or may be a synthetic polynucleotide, or may be a polynucleotide that is also endogenously expressed in the same organism or species as the host cell. For example, a polynucleotide that is endogenously expressed in a host cell may be considered heterologous when it is: situated non-naturally in the host cell; expressed recombinantly in the host cell, either stably or transiently; modified within the host cell; selectively edited within the host cell; expressed in a copy number that differs from the naturally occurring copy number within the host cell; or expressed in a non-natural way within the host cell, such as by manipulating regulatory regions that control expression of the polynucleotide. In some embodiments, a heterologous polynucleotide is a polynucleotide that is endogenously expressed in a host cell but whose expression is driven by a promoter that does not naturally regulate expression of the polynucleotide. In other embodiments, a heterologous polynucleotide is a polynucleotide that is endogenously expressed in a host cell and whose expression is driven by a promoter that does naturally regulate expression of the polynucleotide, but the promoter or another regulatory region is modified. In some embodiments, the promoter is recombinantly activated or repressed. For example, gene-editing based techniques may be used to regulate expression of a polynucleotide, including an endogenous polynucleotide, from a promoter, including an endogenous promoter. See, e.g., Chavez et al., Nat Methods. 2016 July; 13(7): 563-567. A heterologous polynucleotide may comprise a wild-type sequence or a mutant sequence as compared with a reference polynucleotide sequence.

[0170] A polynucleotide encoding any of the polypeptides, such as PALs or TALs, or any other polypeptides associated with the disclosure, may be incorporated into any appropriate vector through any method known in the art. For example, the vector may be an expression vector, including but not limited to a viral vector (e.g., a lentiviral, retroviral, adenoviral, or adeno-associated viral vector), any vector suitable for transient expression, any vector suitable for constitutive expression, or any vector suitable for inducible expression (e.g., a galactose-inducible or doxycycline-inducible vector). The vector may be a cloning vector, such as a plasmid, fosmid, phagemid, virus genome or artificial chromosome.

[0171] As used in this application, the terms “expression vector” or “expression construct” refer to a nucleic acid construct, generated recombinantly or synthetically, with a series of specified nucleic acid elements that permit transcription of a particular polynucleotide in a host cell, such as a yeast cell or bacterial cell. In some embodiments, a polynucleotide associated with the disclosure is inserted into an expression vector or expression construct such that it is operably joined to regulatory sequences and, in some embodiments, expressed as an RNA transcript. In some embodiments, the expression vector or expression construct contains one or more markers, such as a selectable marker, to identify cells transformed or transfected with the expression vector or expression construct. A polynucleotide encoding a polypeptide associated with the disclosure is “operably joined” or “operably linked” to a regulatory sequence when the polynucleotide and the regulatory sequence are covalently linked and the expression or transcription of the polynucleotide is under the influence or control of the regulatory sequence.

[0172] In some embodiments, a polynucleotide encoding any of the polypeptides described in this application is under the control of regulatory sequences (e.g., enhancer sequences). In some embodiments, a polynucleotide (e.g., a polynucleotide comprising a gene) is expressed under the control of a promoter. In some embodiments, the promoter is a native promoter, corresponding to the promoter of the gene in its endogenous context. In other embodiments, the promoter is not the native promoter of the gene, e.g., the promoter is different from the promoter of the gene in its endogenous context.

[0173] In some embodiments, the promoter is a eukaryotic promoter. Non-limiting examples of eukaryotic promoters include TDH3, PGK1, PKC1, PDC1, TEF1, TEF2, RPL18B, SSA1, TDH2, PYK1, TPI1 GAL1, GAL10, GAL7, GAL3, GAL2, MET3, MET25, HXT3, HXT7, ACT1, ADH1, ADH2, CUP1-1, ENO2, and SOD1, as would be known to one of ordinary skill in the art (see, e.g., Addgene website: blog.addgene.org/plasmids-101-the-promoter-region). In some embodiments, the promoter is a prokaryotic promoter (e.g., bacteriophage or bacterial promoter). Non-limiting examples of bacteriophage promoters include Pls1con, T3, T7, SP6, and PL. Non-limiting examples of bacterial promoters include Pbad, PmgrB, Ptrc2, Plac/ara, Ptac, and Pm.

[0174] In some embodiments, the promoter is an inducible promoter. As used in this application, an “inducible promoter” is a promoter controlled by the presence or absence of a molecule. Non-limiting examples of inducible promoters include chemically-regulated promoters and physically-regulated promoters. For chemically-regulated promoters, the transcriptional activity can be regulated by one or more compounds, such as alcohol, an antibiotic such as tetracycline, a carbon source such as galactose, a steroid, a metal, or other compounds. For physically-regulated promoters, transcriptional activity can be regulated by a phenomenon such as light or temperature. Non-limiting examples of tetracycline-regulated promoters include anhydrotetracycline (aTc)-responsive promoters and other tetracycline-responsive promoter systems (e.g., a tetracycline repressor protein (tetR), a tetracycline operator sequence (tetO) and a tetracycline transactivator fusion protein (tTA)). Non-limiting examples of steroid-regulated promoters include promoters based on the rat glucocorticoid receptor, human estrogen receptor, moth ecdysone receptors, and promoters from the steroid/retinoid/thyroid receptor superfamily. Non-limiting examples of metal-regulated promoters include promoters derived from metallothionein (proteins that bind and sequester metal ions) genes. Non-limiting examples of pathogenesis-regulated promoters include promoters induced by salicylic acid, ethylene or benzothiadiazole (BTH). Non-limiting examples of temperature/heat-inducible promoters include heat shock promoters. Non-limiting examples of light-regulated promoters include light responsive promoters from plant cells. In certain embodiments, the inducible promoter is a galactose-inducible promoter. In some embodiments, the inducible promoter is induced by one or more physiological conditions (e.g., pH, temperature, radiation, osmotic pressure, saline gradients, cell surface binding, or concentration of one or more extrinsic or intrinsic inducing agents). Non-limiting examples of an extrinsic inducer or inducing agent include amino acids and amino acid analogs, saccharides and polysaccharides, nucleic acids, protein transcriptional activators and repressors, cytokines, toxins, petroleum-based compounds, metal containing compounds, salts, ions, enzyme substrate analogs, hormones or any combination thereof.

[0175] In some embodiments, the promoter is a constitutive promoter. As used in this application, a “constitutive promoter” refers to an unregulated promoter that allows continuous transcription of a gene. Non-limiting examples of a constitutive promoter include TDH3, PGK1, PKC1, PDC1, TEF1, TEF2, RPL18B, SSA1, TDH2, PYK1, TPI1, HXT3, HXT7, ACT1, ADH1, ADH2, ENO2, and SOD1.

[0176] Other inducible promoters or constitutive promoters known to one of ordinary skill in the art are also contemplated.

[0177] In some embodiments, introduction of a polynucleotide, such as a polynucleotide encoding a polypeptide associated with the disclosure, into a host cell results in genomic integration of the polynucleotide. In some embodiments, a host cell comprises at least 1 copy, at least 2 copies, at least 3 copies, at least 4 copies, at least 5 copies, at least 6 copies, at least 7 copies, at least 8 copies, at least 9 copies, at least 10 copies, at least 11 copies, at least 12 copies, at least 13 copies, at least 14 copies, at least 15 copies, at least 16 copies, at least 17 copies, at least 18 copies, at least 19 copies, at least 20 copies, at least 21 copies, at least 22 copies, at least 23 copies, at least 24 copies, at least 25 copies, at least 26 copies, at least 27 copies, at least 28 copies, at least 29 copies, at least 30 copies, at least 31 copies, at least 32 copies, at least 33 copies, at least 34 copies, at least 35 copies, at least 36 copies, at least 37 copies, at least 38 copies, at least 39 copies, at least 40 copies, at least 41 copies, at least 42 copies, at least 43 copies, at least 44 copies, at least 45 copies, at least 46 copies, at least 47 copies, at least 48 copies, at least 49 copies, at least 50 copies, at least 60 copies, at least 70 copies, at least 80 copies, at least 90 copies, at least 100 copies, or more, including any values in between, of a polynucleotide sequence, such as a polynucleotide sequence encoding any of the polypeptides described in this application, in its genome. Said copies may be inserted into the same locus or into different loci of a recombinant host cell of the disclosure.

[0178] In some embodiments, the sequence of a polynucleotide (e.g., a polynucleotide comprising a gene) is codon-optimized. Codon optimization may increase expression of a gene by at least 10%, at least 15%, at least 20%, at least 25%, at least 30%, at least 35%, at least 40%, at least 45%, at least 50%, at least 55%, at least 60%, at least 65%, at least 70%, at least 75%, at least 80%, at least 85%, at least 90%, at least 95%, or 100%, including all values in between) relative to a reference sequence that is not codon-optimized.

[0179] In some embodiments, a polynucleotide encoding a PAL comprises a sequence that is at least 50% (e.g., at least 55%, 60%, 65%, 70%, 71%, 72%, 73%, 74%, 75%, 76%, 77%, 78%, 79%, 80%, 81%, 82%, 83%, 84%, 85%, 86%, 87%, 88%, 89%, 90%, 91%, 92%, 93%, 94%, 95%, 96%, 97%, 98%, 99% or more than 99%, including all values in between) identical to any one of SEQ ID NOs: 40-76 or 93-108. In certain embodiments, a polynucleotide encoding a PAL comprises any one of SEQ ID NOs: 2 or 198-221. In certain embodiments a polynucleotide encoding a PAL consists of or consists essentially of any one of SEQ ID NOs: 2 or 198-221.

[0180] In some embodiments, a polynucleotide encoding a TAL comprises a sequence that is at least 50% (e.g., at least 55%, 60%, 65%, 70%, 71%, 72%, 73%, 74%, 75%, 76%, 77%, 78%, 79%, 80%, 81%, 82%, 83%, 84%, 85%, 86%, 87%, 88%, 89%, 90%, 91%, 92%, 93%, 94%, 95%, 96%, 97%, 98%, 99% or more than 99%, including all values in between) identical to any one of SEQ ID NOs: 40-76 or 93-108. In certain embodiments, a polynucleotide encoding a TAL comprises any one of SEQ ID NOs: 2 or 222-388. In certain embodiments a polynucleotide encoding a TAL consists of or consists essentially of any one of SEQ ID NOs: SEQ ID NOs: 2 or 222-388.

### Host Cells

[0181] Any of the polynucleotides or polypeptides of the disclosure may be expressed in a host cell. As used in this application, the term “host cell” refers to a cell that can be used to express a polynucleotide, such as a polynucleotide that encodes a polypeptide used in production of trans-cinnamic acid and/or p-coumaric acid and precursors thereof.

[0182] Any suitable host cell may be used to express any of the recombinant polypeptides, including ALs, PALs, or TALs, and other polypeptides disclosed in this application, including eukaryotic cells or prokaryotic cells. Suitable host cells include, but are not limited to, fungal cells (e.g., yeast cells), bacterial cells (e.g., E. coli cells), algal cells, plant cells, insect cells, and animal cells, including mammalian cells.

[0183] Suitable yeast host cells include, but are not limited to: Candida, Hansenula, Saccharomyces, Schizosaccharomyces, Pichia, Kluyveromyces, and Yarrowia. In some embodiments, the yeast cell is Hansenula polymorpha, Saccharomyces cerevisiae, Saccaromyces carlsbergensis, Saccharomyces diastaticus, Saccharomyces norbensis, Saccharomyces kluyveri, Schizosaccharomyces pombe, Pichia pastoris, Pichia finlandica, Pichia trehalophila, Pichia kodamae, Pichia membranaefaciens, Pichia opuntiae, Pichia thermotolerans, Pichia salictaria, Pichia quercuum, Pichia pijperi, Pichia stipitis, Pichia methanolica, Pichia angusta, Kluyveromyces lactis, Candida albicans, or Yarrowia lipolytica.

[0184] In some embodiments, the yeast strain is an industrial polyploid yeast strain. Other non-limiting examples of fungal cells include cells obtained from Aspergillus spp., Penicillium spp., Fusarium spp., Rhizopus spp., Acremonium spp., Neurospora spp., Sordaria spp., Magnaporthe spp., Allomyces spp., Ustilago spp., Botrytis spp., and Trichoderma spp.

[0185] In certain embodiments, the host cell is an algal cell such as Chlamydomonas (e.g., C. Reinhardtii) and Phormidium (P. sp. ATCC29409).

[0186] In other embodiments, the host cell is a prokaryotic cell. Suitable prokaryotic cells include gram positive, gram negative, and gram-variable bacterial cells. The host cell may be a species of, but not limited to: Agrobacterium, Alicyclobacillus, Anabaena, Anacystis, Acinetobacter, Acidothermus, Arthrobacter, Azobacter, Bacillus, Bifidobacterium, Brevibacterium, Butyrivibrio, Buchnera, Campestris, Campylobacter, Clostridium, Corynebacterium, Chromatium, Coprococcus, Escherichia, Enterococcus, Enterobacter, Erwinia, Fusobacterium, Faecalibacterium, Francisella, Flavobacterium, Geobacillus, Haemophilus, Helicobacter, Klebsiella, Lactobacillus, Lactococcus, Ilyobacter, Micrococcus, Microbacterium, Mesorhizobium, Methylobacterium, Methylobacterium, Mycobacterium, Neisseria, Pantoea, Pseudomonas, Prochlorococcus, Rhodobacter, Rhodopseudomonas, Rhodopseudomonas, Roseburia, Rhodospirillum, Rhodococcus, Scenedesmus, Streptomyces, Streptococcus, Synecoccus, Saccharomonospora, Saccharopolyspora, Staphylococcus, Serratia, Salmonella, Shigella, Thermoanaerobacterium, Tropheryma, Tularensis, Temecula, Thermosynechococcus, Thermococcus, Ureaplasma, Xanthomonas, Xylella, Yersinia, and Zymomonas.

[0187] In some embodiments, the bacterial host strain is an industrial strain. Numerous bacterial industrial strains are known and suitable for the methods and compositions described in this application.

[0188] In some embodiments, the bacterial host cell is of the Agrobacterium species (e.g., A. radiobacter, A. rhizogenes, A. rubi), the Arthrobacter species (e.g., A. aurescens, A. citreus, A. globformis, A. hydrocarboglutamicus, A. mysorens, A. nicotianae, A. paraffineus, A. protophonniae, A. roseoparaffinus, A. sulfureus, A. ureafaciens), the Bacillus species (e.g., B. thuringiensis, B. anthracis, B. megaterium, B. subtilis, B. lentus, B. circulars, B. pumilus, B. lautus, B. coagulans, B. brevis, B. firmus, B. alkaophius, B. licheniformis, B. clausii, B. stearothermophilus, B. halodurans, B. amyloliquefaciens). In particular embodiments, the host cell will be an industrial Bacillus strain including but not limited to B. subtilis, B. pumilus, B. licheniformis, B. megaterium, B. clausii, B. stearothermophilus and B. amyloliquefaciens. In some embodiments, the host cell will be an industrial Clostridium species (e.g., C. acetobutylicum, C. tetani E88, C. lituseburense, C. saccharobutylicum, C. perfringens, C. beijerinckii). In some embodiments, the host cell will be an industrial Corynebacterium species (e.g., C. glutamicum, C. acetoacidophilum). In some embodiments, the host cell will be an industrial Escherichia species (e.g., E. coli). In some embodiments, the host cell will be an industrial Erwinia species (e.g., E. uredovora, E. carotovora, E. ananas, E. herbicola, E. punctata, E. terreus). In some embodiments, the host cell will be an industrial Pantoea species (e.g., P. citrea, P. agglomerans). In some embodiments, the host cell will be an industrial Pseudomonas species, (e.g., P. putida, P. aeruginosa, P. mevalonii). In some embodiments, the host cell will be an industrial Streptococcus species (e.g., S. equisimiles, S. pyogenes, S. uberis). In some embodiments, the host cell will be an industrial Streptomyces species (e.g., S. ambofaciens, S. achromogenes, S. avermitilis, S. coelicolor, S. aureofaciens, S. aureus, S. fungicidicus, S. griseus, S. lividans). In some embodiments, the host cell will be an industrial Zymomonas species (e.g., Z. mobilis, Z. lipolytica), and the like.

[0189] The present disclosure is also suitable for use with a variety of animal cell types, including mammalian cells, for example, human (including 293, HeLa, WI38, PER.C6 and Bowes melanoma cells), mouse (including 3T3, NS0, NS1, Sp2/0), hamster (CHO, BHK), monkey (COS, FRhL, Vero), and hybridoma cell lines.

[0190] In various embodiments, cell types or strains that may be used in the practice of the disclosure including both prokaryotic and eukaryotic cell or strains, and are readily accessible to the public from a number of culture collections such as American Type Culture Collection (ATCC), Deutsche Sammlung von Mikroorganismen and Zellkulturen GmbH (DSM), Centraalbureau Voor Schimmelcultures (CBS), and Agricultural Research Service Patent Culture Collection, Northern Regional Research Center (NRRL). The present disclosure is also suitable for use with a variety of plant cell types.

[0191] The term “cell,” as used in this application, may refer to a single cell or a population of cells, such as a population of cells belonging to the same cell line or strain. Use of the singular term “cell” should not be construed to refer explicitly to a single cell rather than a population of cells. The host cell may comprise genetic modifications relative to a wild-type counterpart.

[0192] A vector or polynucleotide encoding any one or more of the recombinant polypeptides (e.g., AL, PAL, or TAL) described in this application may be introduced into a suitable host cell using any method known in the art. Host cells may be cultured under any conditions suitable as would be understood by one of ordinary skill in the art. For example, any media, temperature, and incubation conditions known in the art may be used. For host cells carrying an inducible vector, cells may be cultured with an appropriate inducible agent to promote expression.

[0193] Any of the cells disclosed in this application can be cultured in media of any type (rich or minimal) and any composition prior to, during, and/or after contact and/or integration of a nucleic acid. The conditions of the culture or culturing process can be optimized through routine experimentation as would be understood by one of ordinary skill in the art. In some embodiments, the selected media is supplemented with various components. In some embodiments, the concentration and amount of a supplemental component is optimized. In some embodiments, other aspects of the media and growth conditions (e.g., pH, temperature, etc.) are optimized through routine experimentation. In some embodiments, the frequency that the media is supplemented with one or more supplemental components, and the amount of time that the cell is cultured, is optimized.

[0194] Culturing of the cells described in this application can be performed in culture vessels known and used in the art. In some embodiments, an aerated reaction vessel (e.g., a stirred tank reactor) is used to culture the cells. In some embodiments, a bioreactor or fermenter is used to culture the cell. Thus, in some embodiments, the cells are used in fermentation. As used in this application, the terms “bioreactor” and “fermenter” are interchangeably used and refer to an enclosure, or partial enclosure, in which a biological, biochemical and/or chemical reaction takes place, involving a living organism or part of a living organism. Any type of bioreactor or fermenter known in the art may be compatible with aspects of the disclosure.

[0195] In some embodiments, a bioreactor comprises a cell (e.g., a bacterial cell) or a cell culture (e.g., a bacterial cell culture), such as a cell or cell culture described in this application. In some embodiments, a bioreactor comprises a spore and/or a dormant cell type of an isolated microbe (e.g., a dormant cell in a dry state).

[0196] In some embodiments, the method involves batch fermentation (e.g., shake flask fermentation). General considerations for batch fermentation (e.g., shake flask fermentation) include the level of oxygen and glucose. For example, batch fermentation (e.g., shake flask fermentation) may be oxygen and glucose limited, so in some embodiments, the capability of a strain to perform in a well-designed fed-batch fermentation is underestimated. Also, the final product may display some differences from the substrate in terms of solubility, toxicity, cellular accumulation and secretion and in some embodiments can have different fermentation kinetics.

[0197] Any suitable host cell may be used to produce any of the recombinant polypeptides (e.g., AL, e.g., PAL and/or TAL) disclosed in this application, including eukaryotic cells or prokaryotic cells.

[0198] The disclosure is directed, in part, to host cells comprising polynucleotides encoding a plurality of enzymes with activities that together promote production of an aromatic compound or improve an aromatic compound manufacturing mixture. For example, the disclosure provides a host cell comprising a polynucleotide encoding an AL (e.g., a PAL and/or TAL) described herein and a polynucleotide encoding one or more additional enzymes, wherein the AL and the one or more additional enzymes provide enzymatic activities that promote production of an aromatic compound or improve an aromatic compound manufacturing mixture. In some embodiments, the additional enzyme is 4-coumarate-CoA ligase (4CL), very-long-chain enoyl-CoA reductase (TSC13), chalcone synthase (CHS), 3-hydroxylase (CH3H), O-methyltransferase (OMT), UDP-glucuronosyltransferase (UGT), 4-coumarate 3-hydroxylase, feruloyl-CoA synthetase (FCS), enoyl-CoA hydratase (ECH), benzalacetone synthase (BAS), raspberry ketone/zingerone synthase (RZS1), p-coumaric acid/cinnamic acid carboxyl methyltransferase (CCMT), chalcone isomerase (CHI), and/or 1,2-rhamnosyltransferase.

### Methods

[0199] In some aspects, the disclosure provides methods of using host cells for producing products of interest. In some embodiments, the disclosure provides a method comprising culturing a host cell described in this application (e.g., a host cell comprising a heterologous polynucleotide encoding an AL (e.g., a PAL and/or TAL). Methods for culturing cells are described elsewhere in this application. In some embodiments, the disclosure provides a method of producing trans-cinnamic acid from phenylalanine and/or degrading phenylalanine, comprising culturing a host cell described in this application (e.g., a host cell comprising a heterologous polynucleotide encoding an AL (e.g., a PAL and/or TAL)). In some embodiments, the disclosure provides a method of producing p-coumaric acid from tyrosine and/or degrading tyrosine, comprising culturing a host cell described in this application (e.g., a host cell comprising a heterologous polynucleotide encoding an AL (e.g., a PAL and/or TAL)). In some embodiments, the production occurs ex vivo, e.g., in an in vitro cell culture environment. Compositions, cells, enzymes, and methods described in this application are also applicable to industrial settings, including any application wherein there is a need for increased biosynthesis of trans-cinnamic acid and/or p-coumaric acid.

[0200] In some embodiments, methods associated with the disclosure include methods of producing one or more of the following products: caffeate, caffeic acid, methyl caffeic acid, ferulic acid, hesperetin, HDG, hydroxybenzalacetone, methyl cinnamate, naringenin, naringin, narirutin, phloretin, phloridzin, raspberry ketone, vanillic acid, vanillin, liquiritgenin, (2S)-flavanone, 2-hydroxy-flavanone, 7,4′-dihydroxyflavanone, 2-hydroxy-isoflavanone, formononetin, biochanin, 2′-hydroxy-formononetin, 4-coumaroyl-CoA, apigenin, chalconaringenin, daidzein, daidzin, malonyldaidzein (MGD), dihydrodaidzein, dihydrodaidzein-sulfate, O-desmethylangolensin, 6-OH—O-desmethylangolensin, tetrahydrodaidzein, equol, equol-7-glucuronide, equol-4′-sulfate, 5-hydroxy equol, hippuric acid, 4-hydroxybenzoic acid, 2,6-dimethoxy benzoic acid, fumaric acid, 4-ethylphenol, glutaric acid, 2-phenylpropionic acid, gallic acid, resorcinolsulfate, disometin, chrysoeriol, chrysoeriol-4′-glucuronide, chrysoeriol-7-glucuronide, coumestrol, eriodictyol, dihydroquercetin, genistein, genistin, malonylgenistin (MGG), glycitein, isorhamnetin, kaempferol, laricitrin, luteolin, luteolin-3′-glucuronide, luteolin-4′-glucuronide, morin, myricetin, tetramethylated myricetin, 3,5-dihydroxyphenylacetic acid, 3,4,5-trihydroxyphenylacetic acid, methylated myricetin, myricetin monoglucuronide, myricetin diglucuronide, dimethylated myricetin, pentahydroxy-flavanone, dihydromyricetin, 2R,3S,4S-flavan-3-ol, (+)-Afzelechin, (+)-catechin, (+)-galocatechin, proanthocyanidin, (−)-epiafzelechin, (−)-eoicatechin, (−)-epigallocatechin, taxifolin, dihydroquercetin, aromadendrin, dihydrokaempferol, dihydroquercetin, dihydroflavonol, quercetin, isoquercetin, rutin, peonidin, syringetin, tetrahydroxychalcone, trangeretin, chalcone, 6′-deoxychalcone, isoliquiritigenin, tetraketide, DHK, leuco-pelargonidin, pelargonidin, a pelargonidin-based anthocyanin, DHQ, leuco-cyanidin, cyanidin, a cyanidin-based anthocyanin, DHM, leuco-delphinidin, delphinidin, a delphidin-based anthocyanin, petunidin, malvidin, flavonol, flavone, flavanone, isoflavone, isoflavanone, anthocyanin, cinnamate, methylcinnamate, cinnamoyl-CoA, cinnamaldehyde, styrene, pinocembrin chalcone, pinocembrin, chrysin, baicalein, curcumin, and/or bismethoxy curcumin, or derivatives thereof.

[0201] In some aspects, the disclosure provides a method of producing aromatic compounds for use in the fragrance and/or flavor industries. For example, trans-cinnamic acid has a honey-like odor and can be used to impart cinnamon-like flavors, while p-coumaric acid is found in many natural foods and beverages. In some embodiments, trans-cinnamic acid and/or p-coumaric acid are intermediates produced as part of a method for producing an aromatic compound. The disclosure is directed, in part, to methods of producing an aromatic compound using an AL (e.g., a PAL and/or TAL) described in this disclosure, or a nucleic acid encoding the same, or a host cell comprising any thereof.

[0202] In some embodiments, an AL is engineered to produce increased titers of trans-cinnamate as a first step of producing hesperetin dihydrochalcone 4′-O-glucoside (HDG). In some embodiments, an AL is engineered to produce increased titers of p-coumarate as a first step of producing hesperetin dihydrochalcone 4′-O-glucoside (HDG). HDG is a flavonone that may be used as a sweetener. Without wishing to be bound by any theory, it is believed that increased titers of HDG can be produced by increasing production of trans-cinnamate or p-coumarate. p-coumarate produced by a TAL or converted from trans-cinnamate produced by a PAL is a substrate for 4-coumarate-CoA ligase (4CL), which produces p-coumaroyl CoA from p-coumarate. p-coumaroyl CoA is converted to dihydrocoumaroyl-CoA by very-long-chain enoyl-CoA reductase (TSC13) and then to phloretin by chalcone synthase (CHS). Phloretin is converted to 3-hydroxyphloretin by chalcone 3-hydroxylase (CH₃H), then to hesperetin dihydrochalcone by O-methyltransferase. Finally, hesperetin dihydrochalcone is converted to HDG by a UDP-glucuronosyltransferase (UGT). In some embodiments, a host cell expressing an AL also comprises any one of the enzymes required to produce HDG from trans-cinnamate and/or p-coumarate.

[0203] In some embodiments, an AL is engineered to produce increased titers of trans-cinnamate as a first step of producing ferulic acid. In some embodiments, an AL is engineered to produce increased titers of p-coumarate as a first step of producing ferulic acid. Ferulic acid is a hydroxycinnamic acid that may be used in various foods or fragrances. Without wishing to be bound by any theory, it is believed that increased titers of ferulic acid can be produced by increasing production of trans-cinnamate or p-coumarate. p-coumarate produced by a TAL or converted from trans-cinnamate produced by a PAL is a substrate for 4-coumarate 3-hydroxylase, which produces caffeic acid from p-coumarate. Caffeic acid is then converted to ferulic acid by an O-methyltransferase enzyme. In some embodiments, a host cell expressing an AL also comprises any one of the enzymes required to produce ferulic acid from trans-cinnamate and/or p-coumarate.

[0204] In some embodiments, an AL is engineered to produce increased titers of trans-cinnamate as a first step of producing vanillin. In some embodiments, an AL is engineered to produce increased titers of p-coumarate as a first step of producing vanillin. Vanillin is a major component of vanilla. Without wishing to be bound by any theory, it is believed that increased titers of vanillin can be produced by increasing production of trans-cinnamate or p-coumarate. p-coumarate produced by a TAL or converted from trans-cinnamate produced by a PAL is a substrate for 4-coumarate 3-hydroxylase, which produces caffeic acid from p-coumarate. Caffeic acid is then converted to ferulic acid by an O-methyltransferase enzyme. Ferulic acid is then converted to feruloyl-CoA by feruloyl-CoA synthetase (FCS), and finally to vanillin by enoyl-CoA hydratase (ECH). In some embodiments, a host cell expressing an AL also comprises any one of the enzymes required to produce vanillin from trans-cinnamate and/or p-coumarate.

[0205] In some embodiments, an AL is engineered to produce increased titers of trans-cinnamate as a first step of producing raspberry ketone. In some embodiments, an AL is engineered to produce increased titers of p-coumarate as a first step of producing raspberry ketone. Raspberry ketone is a phenolic compound that is the primary aroma compound of red raspberries. Without wishing to be bound by any theory, it is believed that increased titers of raspberry ketone can be produced by increasing production of trans-cinnamate or p-coumarate. p-coumarate produced by a TAL or converted from trans-cinnamate produced by a PAL is a substrate for 4-coumarate-CoA ligase (4CL), which produces p-coumaroyl CoA from p-coumarate. p-coumaroyl CoA is converted to 4-hydroxybenzildene acetone by benzalacetone synthase (BAS), then to raspberry ketone by raspberry ketone/zingerone synthase (RZS1). In some embodiments, a host cell expressing an AL also comprises any one of the enzymes required to produce raspberry ketone from trans-cinnamate and/or p-coumarate.

[0206] In some embodiments, an AL is engineered to produce increased titers of trans-cinnamate as a first step of producing methyl cinnamate. In some embodiments, an AL is engineered to produce increased titers of p-coumarate as a first step of producing methyl cinnamate. Methyl cinnamate is a methyl ester of cinnamic acid. Methyl cinnamate is used as a flavor or fragrance as its flavor is fruity and strawberry-like and its aroma is sweet and fruity with hints of cinnamon and strawberry. Without wishing to be bound by any theory, it is believed that increased titers of methyl cinnamate can be produced by increasing production of trans-cinnamate or p-coumarate. p-coumarate produced by a TAL or converted from trans-cinnamate produced by a PAL is a substrate for a p-coumaric acid/cinnamic acid carboxyl methyltransferase (CCMT), which produces methyl cinnamate. In some embodiments, a host cell expressing an AL also comprises any one of the enzymes required to produce methyl cinnamate from trans-cinnamate and/or p-coumarate.

[0207] In some embodiments, an AL is engineered to produce increased titers of trans-cinnamate as a first step of producing naringin. In some embodiments, an AL is engineered to produce increased titers of p-coumarate as a first step of producing naringin. Naringin is a flavonone found naturally in many citrus fruits. In grapefruit, naringin is responsible for the fruit's bitter tase. Without wishing to be bound by any theory, it is believed that increased titers of naringin can be produced by increasing production of trans-cinnamate or p-coumarate. p-coumarate produced by a TAL or converted from trans-cinnamate produced by a PAL is a substrate for 4-coumarate-CoA ligase (4CL), which produces p-coumaroyl CoA from p-coumarate. p-coumaroyl CoA is converted to naringenin chalcone by chalcone synthase (CHS), then to naringenin by chalcone isomerase (CHI). Naringenin is converted to prunin by flavonone 7-O-glucosyltransferase, which is then converted to naringin by 1,2-rhamnosyltransferase. In some embodiments, a host cell expressing an AL also comprises any one of the enzyme required to produce naringin from trans-cinnamate and/or p-coumarate.

[0208] In some embodiments, a method comprises converting one or more substrates into one or more aromatic compounds. In some embodiments, a method converts a sugar (e.g., glucose) into one or more aromatic compounds, e.g., by a plurality of steps comprising L-phenylalanine and/or L-tyrosine as intermediates. In some embodiments, L-phenylalanine and/or L-tyrosine are substrates for the production of aromatic compounds. In some embodiments, the disclosure provides a method of converting L-phenylalanine and/or L-tyrosine to trans-cinnamic acid and/or p-coumaric acid by contacting L-phenylalanine and/or L-tyrosine with any host cell described in this disclosure. In some embodiments, the method further comprises converting trans-cinnamic acid and/or p-coumaric acid into a downstream product to produce an aromatic compound. In some embodiments, converting trans-cinnamic acid and/or p-coumaric acid into a downstream product comprises contacting the trans-cinnamic acid and/or p-coumaric acid with an enzyme, e.g., a recombinant enzyme, e.g., of the shikimate pathway. In some embodiments, the enzyme, e.g., a recombinant enzyme, e.g., of the shikimate pathway is within a host cell, e.g., a host cell comprising the AL, e.g., the PAL and/or TAL.

[0209] The disclosure is also directed to a method for improving an aromatic compound manufacturing mixture comprising contacting an aromatic compound manufacturing mixture with an AL (e.g., a PAL and/or TAL), a nucleic acid encoding either thereof, or a host cell comprising any thereof. As used in this disclosure, the term “aromatic compound manufacturing mixture” refers to a mixture comprising a plurality of metabolic intermediates, input materials, and/or manufacturing reagents. Optionally, an aromatic compound manufacturing mixture comprises one or more aromatic compounds. In some embodiments, an aromatic compound manufacturing mixture can be improved, where improved means increasing the level of a desired metabolic intermediate or aromatic compound, or decreasing the level of an undesirable metabolic intermediate or an input material. In some embodiments, improving comprises contacting the mixture with a manufacturing reagent or enzyme (or a composition comprising either thereof, e.g., a cell). For example, an aromatic compound manufacturing mixture may comprise trans-cinnamic acid and/or p-coumaric acid, and optionally one or more metabolic intermediates, input materials, and/or manufacturing reagents. In some embodiments, a method of improving an aromatic compound manufacturing mixture comprises producing an aromatic compound using an AL (e.g., a PAL and/or TAL) described in this disclosure, or a nucleic acid encoding the same, or a host cell comprising any thereof.

[0210] In some embodiments, a host cell and/or an AL (e.g., a PAL and/or TAL) comprise one or more modifications to enhance their effectiveness (e.g., activity and/or stability (e.g., half-life)) in a selected mode of biosynthesis. For example, an AL (e.g., a PAL and/or TAL) may comprise a modification that increases stability and/or activity of the enzyme at acidic pH, e.g., to improve the effectiveness of the PAL or TAL when used in an industry-level batch culture. In some embodiments, the PAL or TAL is immobilized to another agent, e.g., a different enzyme, a polymer (e.g., polysaccharide (e.g., starch)), or an inorganic carrier (e.g., silica gel). Immobilization may increase enzyme stability and/or shelf-life.

### Compositions

[0211] Further aspects of the disclosure relate to compositions containing trans-cinnamic acid and/or p-coumaric acid. Culturing of host cells associated with the disclosure can result in compositions comprising products, including trans-cinnamic acid and/or p-coumaric acid. In some embodiments, compositions obtained by culturing host cells associated with the disclosure result in compositions in which at least 20%, 21%, 22%, 23%, 24%, 25%, 26%, 27%, 28%, 29%, 30%, 31%, 32%, 33%, 34%, 35%, 36%, 37%, 38%, 39%, 40%, 41%, 42%, 43%, 44%, 45%, 46%, 47%, 48%, 49%, 50%, 51%, 52%, 53%, 54%, 55%, 56%, 57%, 58%, 59%, 60%, 61%, 62%, 63%, 64%, 65%, 66%, 67%, 68%, 69%, 70%, 71%, 72%, 73%, 74%, 75%, 76%, 77%, 78%, 79%, 80%, 81%, 82%, 83%, 84%, 85%, 86%, 87%, 88%, 89%, 90%, 91%, 92%, 93%, 94%, 95%, 96%, 97%, 98%, or 99% of the total products in the composition is/are trans-cinnamic acid and/or p-coumaric acid.

[0212] Compositions associated with the disclosure can further comprise additional components as would be understood by one of ordinary skill in the art. For example, it should be appreciated that in some embodiments, compositions comprising trans-cinnamic acid and/or p-coumaric acid can include cell culture fermentation broth or cell culture supernatants. In other embodiments, compositions may include trans-cinnamic acid and/or p-coumaric acid in a form that has been purified from cell culture fermentation broth or cell culture supernatants.

[0213] In some embodiments, cells associated with the invention are cultured in the presence of an organic solvent overlay. As used in this disclosure, an organic solvent overlay refers to a layer comprising one or more organic solvents that is added to a cell culture sample. The organic solvent overlay may partially or fully cover the cell culture sample. The use of an organic solvent overlay can assist with reducing or alleviating host cell toxicity caused by increased concentrations of products. In some embodiments, compositions comprising trans-cinnamic acid and/or p-coumaric acid further comprise one or more components of an organic solvent overlay (e.g., dodecane).

[0214] The present invention is further illustrated by the following Examples, which in no way should be construed as further limiting. The entire contents of all of the references (including literature references, issued patents, published patent applications, and co pending patent applications) cited throughout this application are hereby expressly incorporated by reference.

### EXAMPLES

[0215] In order that the invention described in the present application may be more fully understood, the following examples are set forth. The examples described in this application are offered to illustrate the systems and methods provided in this disclosure and are not to be construed in any way as limiting their scope.

### Example 1. Identification of Variant ALs that Produce Increased Trans-Cinnamic Acid

[0216] This Example describes the identification of variant aromatic amino acid ammonia lyases (ALs) that have phenylalanine ammonia lyase (PAL) activity and are capable of producing increased amounts of trans-cinnamic acid relative to that produced by the wild type PAL from Anabaena variabilis (AvPAL; UniProKB Accession No. Q3M5Z3; SEQ ID NO: 1).

[0217] To identify variant ALs capable of producing increased amounts of trans-cinnamic acid relative to AvPAL, a first protein engineering library of approximately 584 variant ALs and a second protein engineering library of approximately 4000 variant ALs were generated based on the AvPAL sequence (SEQ ID NO: 1). The variant ALs within the libraries comprised amino acid substitutions at one or more amino acid residues including the following seven amino acid residues within the AvPAL sequence (SEQ ID NO: 1): T102, L104, F107, L108, G218, L219, and M222.

[0218] The first protein engineering library of approximately 584 variant ALs was transformed into DH5a competent E. coli cells and stored at −80° C. in glycerol. To initiate cell growth in preparation for screening, glycerol stocks of the AL variant transformants were inoculated into LB media containing 100 μg/mL of carbenicillin and shaken at 1,000 rpm overnight at 37° C. After the initial growth phase, 10 μL of each overnight culture was inoculated into fresh 990 μL LB media containing 100 μg/mL of carbenicillin. The transformants were shaken at 1,000 rpm at 37° C. for two hours, followed by addition of IPTG at a final concentration of 0.2 μL/mL. The transformants were further shaken at 1,000 rpm for four hours at 37° C., then centrifuged at 4,000×g for ten minutes. The supernatant was discarded and the cell pellets were resuspended in phosphate-buffered saline (PBS; 500 mM, pH 7.4).

[0219] The AL variants were evaluated for PAL activity in triplicate in a primary screen using a whole-cell assay. 20 μL of the variant AL transformants in PBS was added to 500 L of M9 media containing phenylalanine (40 mM). After a one hour incubation, the solution was centrifuged and 50 μL of the supernatant was transferred to 50 μL of M9 media for analysis. The solution was analyzed for absorbance at 290 nM, a wavelength at which trans-cinnamic acid absorbs. The wild-type AvPAL and an AvPAL mutant comprising a G218A amino acid substitution were included as controls.

[0220] The 300 variant ALs with the highest PAL activity in the primary screen were analyzed further in a secondary screen to confirm PAL activity in host cell lysates. Variant AL transformants were prepared using the methods described above for the primary screen, but instead of resuspending the cell pellets in PBS, the cell pellets were resuspended in 125 μL of lysis buffer (1× Bugbuster lysis reagent, 2.5 mM 1,4-Dithiothreitol (DTT), 0.2 mM Phenylmethylsulfonyl fluoride (PMSF), 3 U/μL rLysozyme, 0.0025 U/μL Benzonase Nuclease). The lysed pellets were added to 96-well plates, and continuous, kinetic absorbance measurements were collected at 290 nm. Measurements were taken over ten minutes while the 96-well plates were shaken in a slow, orbital movement at 28° C. Results are shown in FIG. 3.

[0221] Variant ALs with the highest PAL activity as observed in the secondary screen are shown in Table 3. A strain expressing the wild-type AvPAL (t888841) was included as a positive control. A strain expressing GFP was included as a negative control. The secondary screen activity scores were calculated by Z-score, normalizing each experimental value to the value of the wild-type control. Overall, 24 variant ALs produced an activity score greater than 1.00. Strain t900097 showed the highest improvement over the control strains, with an activity score of 1.79.

[0222] Without wishing to be bound by any theory, the amino acid substitutions in these 24 variant ALs may affect the substrate binding site of the enzyme by influencing its shape and chemical composition, which may produce changes in substrate binding affinity and/or enzymatic catalysis.

TABLE 3
Trans-cinnamic acid production by variant ALs

| | | | Secondary Screen |
|---|---|---|---|
| | | | Activity Score |
| | AL | | (normalized to the |
| | protein | | average value of the |
| | SEQ ID | Substitutions Relative | WT control |
| Strain ID | NO: | to SEQ ID NO: 1 | (t888841)) |
| t888841 | 1 | N/A | N/A |
| (wild-type) | | | |
| GFP | N/A | N/A | N/A |
| Negative | | | |
| Control | | | |
| t900097 | 5 | T102H; L104M; G218A | 1.79 |
| t900270 | 6 | L104M; L108T; G218A | 1.51 |
| t900424 | 7 | T102K | 1.48 |
| t902826 | 8 | T102E; L104M; L108T; | 1.38 |
| | | G218A; M222L | |
| t900166 | 9 | T102S; M222L | 1.36 |
| t903111 | 10 | T102H; L104M; L219I | 1.35 |
| t903984 | 11 | T102H; L104M; L108T; | 1.33 |
| | | G218A; M222V | |
| t899644 | 12 | T102K; G218A | 1.30 |
| t903141 | 13 | T102S; L108T; G218S; | 1.28 |
| | | M222L | |
| t899646 | 14 | T102E; L108T; M222I | 1.17 |
| t900622 | 15 | T102E; G218S | 1.16 |
| t904262 | 16 | T102K; L104I; L108T; | 1.16 |
| | | M222L | |
| t899973 | 17 | T102S; L104M; L108M | 1.15 |
| t900177 | 18 | T102K; G218A; M222T | 1.14 |
| t902547 | 19 | T102S; L104M; L219I; | 1.11 |
| | | M222L | |
| t899454 | 20 | T102H; L108T | 1.10 |
| t900320 | 21 | L104M; M222V | 1.10 |
| t904103 | 22 | T102H; L104M; G218A; | 1.09 |
| | | M222T | |
| t900578 | 23 | M222L | 1.07 |
| t899285 | 24 | T102S; L108T; M222L | 1.04 |
| t903447 | 25 | T102S; L108V; G218A | 1.04 |
| t902439 | 26 | L104A; L108T; G218A | 1.03 |
| t904333 | 27 | L104V; L108T | 1.03 |
| t903300 | 28 | T102K; L108V; M222L | 1.00 |

### Example 2. Identification of Variant ALs that Exhibit Tyrosine Ammonia Lyase Activity

[0223] AL enzymes can also exhibit tyrosine ammonia lyase (TAL) activity. ALs are often promiscuous in terms of enzymatic activity, allowing ALs to be active on L-phenylalanine, L-tyrosine, and/or L-histidine as substrates. As described in the present disclosure, amino acid substitutions at specific positions (e.g., F107 and/or L108) may shift the AL binding affinity from one substrate to another. This Example describes the engineering of the AvPAL parent enzyme at specific amino acid residues to shift its affinity from one substrate (e.g., L-phenylalanine) to another substrate (e.g., L-tyrosine).

[0224] In order to assess whether any of the variant ALs identified in Example 1 also exhibit TAL activity, the second, 4000-member protein engineering library described in Example 1 was also screened for TAL activity by assessing whether the AL variants were capable of producing increased amounts of p-coumaric acid relative to AvPAL on a tyrosine substrate.

[0225] The AL variants were evaluated for TAL activity in triplicate in a primary screen using a whole-cell assay. 20 μL of the variant AL transformants in PBS was added to 500 μL of M9 media containing tyrosine (40 mM). After a one hour incubation, the solution was centrifuged and 50 μL of the supernatant was transferred to 50 μL of M9 media for analysis. The solution was analyzed for absorbance at 310 nm and 600 nm. The wild-type AvPAL and a TAL (RsTAL) were included as positive controls. A strain expressing GFP was included as a negative control.

[0226] The 300 variant ALs with the highest TAL activity in this primary screen were analyzed further in a secondary screen using cell lysates to confirm TAL activity. To prepare the cell lysates, variant AL transformants were prepared as described for the primary screen in Example 1, but instead of resuspending the cell pellets in PBS, the cell pellets were resuspended in 250 μL of lysis buffer (1× Bugbuster lysis reagent, 2.5 mM 1,4-Dithiothreitol (DTT), 0.2 mM Phenylmethylsulfonyl fluoride (PMSF), 3 U/μL rLysozyme, 0.0025 U/μL Benzonase Nuclease). The cell pellets were lysed and centrifuged at 4,000×g for 3 minutes. 50 μL of clarified lysate from each sample was added to a well of an assay plate containing 150 μL of assay buffer (1 mM L-tyrosine in M9 media) per well. After 4 hours of incubation time at room temperature, the assay plates containing the lysates and assay buffer were read at 290 nm, 310 nm, and 600 nm. Results are shown in FIG. 4.

[0227] Variant ALs with the highest TAL activity as observed in the secondary screen using the cell lysate assay are shown in Table 4. The secondary screen activity scores were calculated by Z-score, normalizing each experimental value to the value of the RsTAL Control (strain t915919). Overall, 167 variant ALs produced an activity score greater than 1.00. Strain t900309 showed the highest improvement over the control strains, with an activity score of 3.82.

[0228] Without wishing to be bound by any theory, the amino acid substitutions in these 167 variant ALs may affect the substrate binding site of the enzyme by influencing its shape and chemical composition, which may produce changes in substrate binding affinity and/or enzymatic catalysis.

TABLE 4
p-coumaric acid production by variant ALs

| | | | Secondary Screen |
|---|---|---|---|
| | | | Activity Score |
| | AL | | (normalized to the |
| | protein | | average value of |
| | SEQ | Substitutions Relative | the RsTAL control |
| Strain ID | ID NO: | to SEQ ID NO: 1 | (t915919)) |
| t888841 | 1 | N/A | N/A |
| (wild-type) | | | |
| GFP | N/A | N/A | N/A |
| Negative | | | |
| Control | | | |
| t915919 | 4 | RsTAL Control | N/A |
| t900309 | 29 | L104A; L108Q; L219I; | 3.82 |
| | | M222N | |
| t904359 | 30 | T102S; L108Q; G218A | 3.65 |
| | | L219I | |
| t899349 | 31 | T102H; L104M; L108M; | 3.65 |
| | | L219I; M222L | |
| t904360 | 32 | T102E; F107Y; L108M; | 3.57 |
| | | G218S; L219I; M222N | |
| t900541 | 33 | L104I; L108H; G218A; | 3.52 |
| | | L219I; M222V | |
| t903485 | 34 | T102E; L104M; F107Y; | 3.47 |
| | | M222I | |
| t903905 | 35 | T102E; L104V; F107Y; | 3.46 |
| | | L108M; L219I; M222T | |
| t900376 | 36 | T102S; L104I; G218S; | 3.46 |
| | | L219I; M222V | |
| t900070 | 37 | L104V; G218A; M222L | 3.45 |
| t903327 | 38 | T102K; L108H; G218A; | 3.40 |
| | | L219I; M222T | |
| t903331 | 39 | L1041; L108M; G218S | 3.36 |
| t899517 | 40 | T102H; F107Y; L108M; | 3.36 |
| | | L219I; M222V | |
| t902928 | 41 | L104V; F107H; L108Q; | 3.35 |
| | | M222L | |
| t903870 | 42 | T102K; L104A; L108Q; | 3.32 |
| | | G218A; L219I | |
| t900570 | 43 | T102S; L104A; F107S; | 3.31 |
| | | L219I; M222N | |
| t901073 | 44 | T102S; L108H; G218S; | 3.29 |
| | | M222V | |
| t900842 | 45 | T102K; L104A; L108H; | 3.29 |
| | | L219I; M222N | |
| t903554 | 46 | T102S; L108H; M222N | 3.27 |
| t902525 | 47 | T102H; L104M; L108M; | 3.25 |
| | | L219I | |
| t900314 | 48 | T102K; L104A; F107Y; | 3.24 |
| | | L108V; G218A; L219I; | |
| | | M222N | |
| t903000 | 49 | T102H; L108M; G218S; | 3.23 |
| | | M222L | |
| t900137 | 50 | T102E; L104M; F107Y; | 3.22 |
| | | L108M; G218A; L219I | |
| t902777 | 51 | T102E; L104V; F107H; | 3.21 |
| | | M222N | |
| t900470 | 52 | T102H; F107H; L108M; | 3.18 |
| | | L219I; M222T | |
| t903261 | 53 | T102H; L104V; F107S; | 3.15 |
| | | L108Q; G218S; M222T | |
| t899659 | 54 | T102E; L104M; F107S; | 3.14 |
| | | L108M; G218A; L219I | |
| t903839 | 55 | T102E; L104V; F107Y; | 3.14 |
| | | L108M; L219I | |
| t903683 | 56 | T102K; F107Y; L108V; | 3.09 |
| | | L219I; M222V | |
| t903786 | 57 | T102E; L104M; F107H; | 3.07 |
| | | G218A; L219I; M222L | |
| t900534 | 58 | T102H; L104M; F107Y; | 3.07 |
| | | G218A; M222I | |
| t899681 | 59 | F107Y; L219I; M222N | 3.06 |
| t899385 | 60 | T102S; L104A; F107Y; | 3.06 |
| | | L108M | |
| t899234 | 61 | T102E; F107Y; L108M; | 3.05 |
| | | G218A; L219I; M222V | |
| t903684 | 62 | T102K; L104M; F107Y; | 3.03 |
| | | L108V; G218S; M222N | |
| t902742 | 63 | L104I; F107H; L108M; | 3.02 |
| | | L219I; M222V | |
| t901124 | 64 | T102K; F107Y; L108V; | 3.00 |
| | | M222L | |
| t903556 | 65 | T102E; L104I; F107S; | 2.97 |
| | | L108T; L219I; M222I | |
| t900261 | 66 | L104I; F107H; L219I | 2.97 |
| t903832 | 67 | T102S; L104I; F107S; | 2.95 |
| | | G218S; L219I; M222V | |
| t899661 | 68 | T102H; L104M; F107Y; | 2.94 |
| | | L108T; G218S; M222L | |
| t900441 | 69 | L104M; F107Y; L108T; | 2.92 |
| | | M222L | |
| t904233 | 70 | T102E; F107Y; L108M; | 2.90 |
| | | M222T | |
| t902516 | 71 | T102S; L104A; F107Y; | 2.90 |
| | | L108T; G218S; L219I | |
| t900250 | 72 | T102K; L104I; F107H; | 2.90 |
| | | L219I; M222I | |
| t902538 | 73 | T102K; L104I; F107H; | 2.88 |
| | | L108H; M222T | |
| t900135 | 74 | T102K; L104I; F107H; | 2.86 |
| | | L219I; M222L | |
| t904309 | 75 | T102H; L104A; F107Y; | 2.86 |
| | | L108T; M222T | |
| t899303 | 76 | T102K; F107H; L108M; | 2.84 |
| | | L219I; M222I | |
| t903599 | 77 | T102H; L104M; F107S; | 2.82 |
| | | L108M; G218A; M222I | |
| t900257 | 78 | T102S; L104M; L108Q; | 2.82 |
| | | G218A; M222V | |
| t900204 | 79 | T102E; L104V; L108M; | 2.81 |
| | | M222I | |
| t903569 | 80 | F107Y; L108V; M222V | 2.79 |
| t903678 | 81 | L104A; F107H; L108V; | 2.78 |
| | | G218A; M222T | |
| t900518 | 82 | T102K; L104A; F107H; | 2.77 |
| | | L108T; G218A | |
| t899485 | 83 | L108M; G218S; M222I | 2.76 |
| t903247 | 84 | L104V; F107H; L108H; | 2.75 |
| | | M222L | |
| t902757 | 85 | T102H; F107H; G218A; | 2.74 |
| | | L219I; M222V | |
| t902788 | 86 | T102E; L104V; F107H; | 2.73 |
| | | L108H; M222I | |
| t899939 | 87 | L104A; L108M; L219I; | 2.73 |
| | | M222N | |
| t903070 | 88 | T102K; F107Y; L219I; | 2.72 |
| | | M222I | |
| t901084 | 89 | F107S; L108Q; L219I; | 2.69 |
| | | M222V | |
| t900075 | 90 | T102E; L104I; F107Y; | 2.68 |
| | | L108H; M222N | |
| t899817 | 91 | T102H; F107Y; L108M; | 2.66 |
| | | M222L | |
| t900304 | 92 | T102E; L104V; F107Y; | 2.65 |
| | | L108H; L219I; M222T | |
| t903671 | 93 | T102E; F107Y; G218S; | 2.64 |
| | | L219I; M222V | |
| t899801 | 94 | F107S; L108H; G218S; | 2.63 |
| | | L219I; M222L | |
| t903810 | 95 | T102E; L104V; F107H; | 2.63 |
| | | L219I; M222V | |
| t903609 | 96 | L104A; L108V; G218A; | 2.62 |
| | | L219I; M222L | |
| t904224 | 97 | T102E; L104I; L108M; | 2.62 |
| | | M222I | |
| t899897 | 98 | T102H; L104V; L108H; | 2.61 |
| | | L219I; M222L | |
| t904382 | 99 | T102H; L104V; L108H; | 2.60 |
| | | M222I | |
| t899614 | 100 | T102E; F107H; L108H; | 2.60 |
| | | G218A; L219I | |
| t900493 | 101 | T102E; F107Y; G218S; | 2.60 |
| | | M222V | |
| t900056 | 102 | T102S; L108M; L219I; | 2.60 |
| | | M222I | |
| t902703 | 103 | T102S; F107H; G218A; | 2.59 |
| | | M222T | |
| t903478 | 104 | L104A; F107H; L219I; | 2.58 |
| | | M222I | |
| t903415 | 105 | T102S; F107Y; L219I; | 2.57 |
| | | M222L | |
| t900280 | 106 | T102E; F107Y; L108M; | 2.57 |
| | | G218A; M222V | |
| t904001 | 107 | T102E; L104M; F107S; | 2.56 |
| | | L108T; G218S; L219I; | |
| | | M222V | |
| t897903 | 108 | T102S; L104V; F107H; | 2.54 |
| | | L108H | |
| t900237 | 109 | T102E; F107Y; L108M; | 2.54 |
| | | L219I; M222I | |
| t903852 | 110 | T102K; F107S; L108H; | 2.53 |
| | | G218A; L219I; M222L | |
| t903783 | 111 | T102K; L104A; F107Y; | 2.53 |
| | | L108T; G218S; L219I; | |
| | | M222L | |
| t902507 | 112 | T102E; L104M; F107H; | 2.51 |
| | | G218S; M222V | |
| t903472 | 113 | T102S; L104V; F107S; | 2.49 |
| | | L108H; L219I; M222I | |
| t903445 | 114 | T102E; L104M; L108M; | 2.48 |
| | | G218A; L219I; M222T | |
| t899874 | 115 | T102E; L104V; F107Y; | 2.46 |
| | | L108H; G218S | |
| t903669 | 116 | T102H; L104V; F107S; | 2.45 |
| | | L108T; G218A; M222T | |
| t899582 | 117 | T102S; F107H; L219I; | 2.40 |
| | | M222I | |
| t903313 | 118 | T102S; L104A; F107H; | 2.40 |
| | | M222L | |
| t903018 | 119 | T102K; L104M; F107Y; | 2.39 |
| | | L108H; G218A; M222I | |
| t904043 | 120 | T102E; L104A; L108M; | 2.38 |
| | | M222V | |
| t899778 | 121 | T102H; L104V; F107H; | 2.37 |
| | | L108T; M222I | |
| t902749 | 122 | T102E; F107Y; L108V; | 2.36 |
| | | M222V | |
| t903837 | 123 | T102E; L104A; F107Y; | 2.36 |
| | | M222N | |
| t899595 | 124 | T102E; F107S; L108T; | 2.35 |
| | | G218A; L219I; M222I | |
| t903999 | 125 | T102H; L104A; F107H; | 2.35 |
| | | L108T; G218S; L219I; | |
| | | M222L | |
| t899254 | 126 | T102H; L104M; F107H; | 2.34 |
| | | L219I; M222L | |
| t899587 | 127 | T102E; F107Y; L108M; | 2.34 |
| | | G218A; M222I | |
| t903126 | 128 | T102E; L104M; F107H; | 2.33 |
| | | L108V; L219I; M222L | |
| t897909 | 129 | T102H; F107Y; L108H; | 2.32 |
| | | G218S; M222L | |
| t899316 | 130 | L104M; L108M; L219I; | 2.32 |
| | | M222L | |
| t903927 | 131 | L104I; F107Y; L108H; | 2.31 |
| | | G218A; M222V | |
| t899276 | 132 | T102E; L104M; F107S; | 2.28 |
| | | G218A; L219I; M222N | |
| t903921 | 133 | T102E; L104A; F107H; | 2.27 |
| | | M222I | |
| t899696 | 134 | L104V; F107Y; L108H; | 2.27 |
| | | G218A; M222I | |
| t899835 | 135 | T102E; L104I; F107S; | 2.25 |
| | | L108H; L219I; M222L | |
| t900002 | 136 | T102K; L104M; L108M; | 2.25 |
| | | G218A | |
| t897927 | 137 | T102E; F107Y; L108T; | 2.24 |
| | | G218A; L219I; M222I | |
| t902820 | 138 | T102S; L1041; F107H; | 2.23 |
| | | L108V; M222L | |
| t899604 | 139 | T102K; L108M; G218A; | 2.22 |
| | | L219I; M222L | |
| t899513 | 140 | T102S; F107S; L108H; | 2.21 |
| | | G218S; M222V | |
| t903230 | 141 | T102H; L108H; L219I; | 2.18 |
| | | M222L | |
| t900395 | 142 | T102S; L104A; F107H; | 2.18 |
| | | L108V; M222L | |
| t904192 | 143 | T102E; L104A; F107H; | 2.17 |
| | | G218A; M222I | |
| t899840 | 144 | T102E; L104V; L108M; | 2.16 |
| | | M222L | |
| t904358 | 145 | T102E; L104A; F107H; | 2.14 |
| | | M222V | |
| t899871 | 146 | T102H; F107Y; L108H; | 2.13 |
| | | G218A; L219I; M222I | |
| t902832 | 147 | T102E; F107S; L108V; | 2.12 |
| | | M222L | |
| t899261 | 148 | T102H; L108M; L219I; | 2.09 |
| | | M222V | |
| t903895 | 149 | T102S; L104M; F107S; | 2.08 |
| | | L108H; G218A; L219I; | |
| | | M222V | |
| t902834 | 150 | T102H; L1041; F107H; | 2.07 |
| | | L108T; M222T | |
| t899266 | 151 | T102E; F107S; G218A; | 2.03 |
| | | M222N | |
| t902888 | 152 | T102H; L104V; F107Y; | 2.02 |
| | | L108H; L219I; M222V | |
| t903908 | 153 | T102E; F107Y; L108M; | 2.00 |
| | | L219I; M222V | |
| t899507 | 154 | T102H; L104I; F107H; | 1.97 |
| | | L219I; M222V | |
| t900251 | 155 | T102K; L104A; F107H; | 1.96 |
| | | L108V; G218A | |
| t903988 | 156 | T102K; L104M; F107H; | 1.95 |
| | | G218A; M222T | |
| t902587 | 157 | T102S; F107H; L108H; | 1.95 |
| | | M222V | |
| t900125 | 158 | L104A; L108M; G218A | 1.94 |
| t900247 | 159 | L104V; L108M | 1.93 |
| t899718 | 160 | T102H; L104M; L108H; | 1.89 |
| | | G218A; L219I; M222L | |
| t899788 | 161 | T102H; L108M; G218A; | 1.89 |
| | | M222T | |
| t900451 | 162 | T102H; L104I; F107H; | 1.83 |
| | | M222I | |
| t899501 | 163 | T102E; F107H; L108M; | 1.78 |
| | | L219I; M222V | |
| t897929 | 164 | F107S; L108T; G218A; | 1.78 |
| | | L219I; M222I | |
| t904107 | 165 | T102E; L104V; F107Y; | 1.77 |
| | | L108H; L219I; M222L | |
| t900001 | 166 | T102K; L104V; F107H; | 1.72 |
| | | M222I | |
| t899786 | 167 | T102H; L104M; F107Y; | 1.72 |
| | | L108H; G218A; L219I; | |
| | | M222L | |
| t902438 | 168 | T102E; F107Y; L108V; | 1.71 |
| | | G218S; M222N | |
| t902554 | 169 | T102E; L104V; L108H; | 1.69 |
| | | L219I; M222I | |
| t902740 | 170 | L104A; F107H; L108T; | 1.69 |
| | | G218A; M222I | |
| t900090 | 171 | T102E; L104I; F107H; | 1.69 |
| | | L108V; M222I | |
| t902435 | 172 | L104V; L108H; L219I; | 1.65 |
| | | M222I | |
| t904324 | 173 | T102E; L104V; F107H; | 1.65 |
| | | M222I | |
| t903946 | 174 | L108M; G218A; L219I; | 1.62 |
| | | M222V | |
| t900007 | 175 | T102H; L108M; G218A; | 1.61 |
| | | L219I; M222L | |
| t897910 | 176 | T102S; L104M; F107H; | 1.59 |
| | | M222T | |
| t897898 | 177 | T102E; L104V; F107Y; | 1.58 |
| | | L108H; G218A; M222I | |
| t900300 | 178 | T102E; L104I; F107S; | 1.58 |
| | | L108H; L219I | |
| t899762 | 179 | T102E; L104M; F107H | 1.57 |
| t899556 | 180 | L104I; F107H; L108T; | 1.52 |
| | | L219I; M222L | |
| t902721 | 181 | F107H; L108M; M222V | 1.48 |
| t899350 | 182 | T102K; F107S; L108H; | 1.48 |
| | | G218S; L219I | |
| t903282 | 183 | T102H; F107S; L108H; | 1.42 |
| | | G218A; M222V | |
| t899988 | 184 | T102E; L104I; F107H; | 1.40 |
| | | M222V | |
| t900028 | 185 | T102H; F107H; L108T; | 1.33 |
| | | G218A; L219I; M222L | |
| t902760 | 186 | L104M; L108V; L219I; | 1.28 |
| | | M222T | |
| t903294 | 187 | T102K; L104M; L108H; | 1.26 |
| | | G218A; M222L | |
| t899423 | 188 | T102H; L108H; G218S | 1.24 |
| t899758 | 189 | T102E; F107Y; L108H; | 1.20 |
| | | G218S; L219I | |
| t900185 | 190 | T102E; F107Y; L108T; | 1.18 |
| | | G218A; M222L | |
| t903098 | 191 | F107H; L108H; G218A | 1.18 |
| t902752 | 192 | T102E; L104M; F107Y; | 1.12 |
| | | L108T; G218S; M222I | |
| t902836 | 193 | L104M; F107Y; L108V; | 1.06 |
| | | G218S; L219I; M222L | |
| t903866 | 194 | T102S; F107S; L108Q; | 1.03 |
| | | L219I; M222L | |
| t903316 | 195 | T102S; F107S; L108H; | 1.03 |
| | | L219I; M222N | |

TABLE 5
Sequences of ALs described in Example 1 and Example 2

| Strain ID | Amino Acid SEQ ID NO: | Nucleotide SEQ ID NO: |
|---|---|---|
| t888841 | 1 | 2 |
| t888850 | 3 | 196 |
| t915919 | 4 | 197 |
| t900097 | 5 | 198 |
| t900270 | 6 | 199 |
| t900424 | 7 | 200 |
| t902826 | 8 | 201 |
| t900166 | 9 | 202 |
| t903111 | 10 | 203 |
| t903984 | 11 | 204 |
| t899644 | 12 | 205 |
| t903141 | 13 | 206 |
| t899646 | 14 | 207 |
| t900622 | 15 | 208 |
| t904262 | 16 | 209 |
| t899973 | 17 | 210 |
| t900177 | 18 | 211 |
| t902547 | 19 | 212 |
| t899454 | 20 | 213 |
| t900320 | 21 | 214 |
| t904103 | 22 | 215 |
| t900578 | 23 | 216 |
| t899285 | 24 | 217 |
| t903447 | 25 | 218 |
| t902439 | 26 | 219 |
| t904333 | 27 | 220 |
| t903300 | 28 | 221 |
| t900309 | 29 | 222 |
| t904359 | 30 | 223 |
| t899349 | 31 | 224 |
| t904360 | 32 | 225 |
| t900541 | 33 | 226 |
| t903485 | 34 | 227 |
| t903905 | 35 | 228 |
| t900376 | 36 | 229 |
| t900070 | 37 | 230 |
| t903327 | 38 | 231 |
| t903331 | 39 | 232 |
| t899517 | 40 | 233 |
| t902928 | 41 | 234 |
| t903870 | 42 | 235 |
| t900570 | 43 | 236 |
| t901073 | 44 | 237 |
| t900842 | 45 | 238 |
| t903554 | 46 | 239 |
| t902525 | 47 | 240 |
| t900314 | 48 | 241 |
| t903000 | 49 | 242 |
| t900137 | 50 | 243 |
| t902777 | 51 | 244 |
| t900470 | 52 | 245 |
| t903261 | 53 | 246 |
| t899659 | 54 | 247 |
| t903839 | 55 | 248 |
| t903683 | 56 | 249 |
| t903786 | 57 | 250 |
| t900534 | 58 | 251 |
| t899681 | 59 | 252 |
| t899385 | 60 | 253 |
| t899234 | 61 | 254 |
| t903684 | 62 | 255 |
| t902742 | 63 | 256 |
| t901124 | 64 | 257 |
| t903556 | 65 | 258 |
| t900261 | 66 | 259 |
| t903832 | 67 | 260 |
| t899661 | 68 | 261 |
| t900441 | 69 | 262 |
| t904233 | 70 | 263 |
| t902516 | 71 | 264 |
| t900250 | 72 | 265 |
| t902538 | 73 | 266 |
| t900135 | 74 | 267 |
| t904309 | 75 | 268 |
| t899303 | 76 | 269 |
| t903599 | 77 | 270 |
| t900257 | 78 | 271 |
| t900204 | 79 | 272 |
| t903569 | 80 | 273 |
| t903678 | 81 | 274 |
| t900518 | 82 | 275 |
| t899485 | 83 | 276 |
| t903247 | 84 | 277 |
| t902757 | 85 | 278 |
| t902788 | 86 | 279 |
| t899939 | 87 | 280 |
| t903070 | 88 | 281 |
| t901084 | 89 | 282 |
| t900075 | 90 | 283 |
| t899817 | 91 | 284 |
| t900304 | 92 | 285 |
| t903671 | 93 | 286 |
| t899801 | 94 | 287 |
| t903810 | 95 | 288 |
| t903609 | 96 | 289 |
| t904224 | 97 | 290 |
| t899897 | 98 | 291 |
| t904382 | 99 | 292 |
| t899614 | 100 | 293 |
| t900493 | 101 | 294 |
| t900056 | 102 | 295 |
| t902703 | 103 | 296 |
| t903478 | 104 | 297 |
| t903415 | 105 | 298 |
| t900280 | 106 | 299 |
| t904001 | 107 | 300 |
| t897903 | 108 | 301 |
| t900237 | 109 | 302 |
| t903852 | 110 | 303 |
| t903783 | 111 | 304 |
| t902507 | 112 | 305 |
| t903472 | 113 | 306 |
| t903445 | 114 | 307 |
| t899874 | 115 | 308 |
| t903669 | 116 | 309 |
| t899582 | 117 | 310 |
| t903313 | 118 | 311 |
| t903018 | 119 | 312 |
| t904043 | 120 | 313 |
| t899778 | 121 | 314 |
| t902749 | 122 | 315 |
| t903837 | 123 | 316 |
| t899595 | 124 | 317 |
| t903999 | 125 | 318 |
| t899254 | 126 | 319 |
| t899587 | 127 | 320 |
| t903126 | 128 | 321 |
| t897909 | 129 | 322 |
| t899316 | 130 | 323 |
| t903927 | 131 | 324 |
| t899276 | 132 | 325 |
| t903921 | 133 | 326 |
| t899696 | 134 | 327 |
| t899835 | 135 | 328 |
| t900002 | 136 | 329 |
| t897927 | 137 | 330 |
| t902820 | 138 | 331 |
| t899604 | 139 | 332 |
| t899513 | 140 | 333 |
| t903230 | 141 | 334 |
| t900395 | 142 | 335 |
| t904192 | 143 | 336 |
| t899840 | 144 | 337 |
| t904358 | 145 | 338 |
| t899871 | 146 | 339 |
| t902832 | 147 | 340 |
| t899261 | 148 | 341 |
| t903895 | 149 | 342 |
| t902834 | 150 | 343 |
| t899266 | 151 | 344 |
| t902888 | 152 | 345 |
| t903908 | 153 | 346 |
| t899507 | 154 | 347 |
| t900251 | 155 | 348 |
| t903988 | 156 | 349 |
| t902587 | 157 | 350 |
| t900125 | 158 | 351 |
| t900247 | 159 | 352 |
| t899718 | 160 | 353 |
| t899788 | 161 | 354 |
| t900451 | 162 | 355 |
| t899501 | 163 | 356 |
| t897929 | 164 | 357 |
| t904107 | 165 | 358 |
| t900001 | 166 | 359 |
| t899786 | 167 | 360 |
| t902438 | 168 | 361 |
| t902554 | 169 | 362 |
| t902740 | 170 | 363 |
| t900090 | 171 | 364 |
| t902435 | 172 | 365 |
| t904324 | 173 | 366 |
| t903946 | 174 | 367 |
| t900007 | 175 | 368 |
| t897910 | 176 | 369 |
| t897898 | 177 | 370 |
| t900300 | 178 | 371 |
| t899762 | 179 | 372 |
| t899556 | 180 | 373 |
| t902721 | 181 | 374 |
| t899350 | 182 | 375 |
| t903282 | 183 | 376 |
| t899988 | 184 | 377 |
| t900028 | 185 | 378 |
| t902760 | 186 | 379 |
| t903294 | 187 | 380 |
| t899423 | 188 | 381 |
| t899758 | 189 | 382 |
| t900185 | 190 | 383 |
| t903098 | 191 | 384 |
| t902752 | 192 | 385 |
| t902836 | 193 | 386 |
| t903866 | 194 | 387 |
| t903316 | 195 | 388 |

[0229] It should be appreciated that sequences disclosed in this application may or may not contain secretion signals. The sequences disclosed in this application encompass versions with or without secretion signals. It should also be understood that amino acid sequences disclosed in this application may be depicted with or without a start codon (M). The sequences disclosed in this application encompass versions with or without start codons. Accordingly, in some instances amino acid numbering may correspond to amino acid sequences containing secretion signal and/or a start codon, while in other instances, amino acid numbering may correspond to amino acid sequences that do not contain a secretion signal and/or a start codon. It should also be understood that sequences disclosed in this application may be depicted with or without a stop codon. The sequences disclosed in this application encompass versions with or without stop codons.

### EQUIVALENTS

[0230] Those skilled in the art will recognize or be able to ascertain using no more than routine experimentation, many equivalents to the specific embodiments of the invention described in the present application. Such equivalents are intended to be encompassed by the following claims.

[0231] All references, including patent documents, are incorporated by reference in their entirety.

The application's sequence listing, which the Patent Office published only in electronic form, follows.

SEQUENCE LISTING (390 sequences)

SEQ ID NO: 1 - protein, 567 aa, Anabaena variabilis
MKTLSQAQSKTSSQQFSFTGNSSANVIIGNQKLTINDVARVARNGTLVSLTNNTDILQGIQASCDYINNAVESGEPIYGVTSGFGGMANVAISREQASELQTNLVWFLKTGAGNKLPLADVRAAMLLRANSHMRGASGIRLELIKRMEIFLNAGVTPYVYEFGSIGASGDLVPLSYITGSLIGLDPSFKVDFNGKEMDAPTALRQLNLSPLTLLPKEGLAMMNGTSVMTGIAANCVYDTQILTAIAMGVHALDIQALNGTNQSFHPFIHNSKPHPGQLWAADQMISLLANSQLVRDELDGKHDYRDHELIQDRYSLRCLPQYLGPIVDGISQIAKQIEIEINSVTDNPLIDVDNQASYHGGNFLGQYVGMGMDHLRYYIGLLAKHLDVQIALLASPEFSNGLPPSLLGNRERKVNMGLKGLQICGNSIMPLLTFYGNSIADRFPTHAEQFNQNINSQGYTSATLARRSVDIFQNYVAIALMFGVQAVDLRTYKKTGHYDARACLSPATERLYSAVRHVVGQKPTSDRPYIWNDNEQGLDEHIARISADIAAGGVIVQAVQDILPCLH

SEQ ID NO: 2 - DNA, 1701 bp, synthetic construct
  source 1..1701: mol_type = other DNA
atgaaaacactgtcccaagcacagtcgaagacgagtagccagcagttttctttcaccggtaattctagcgctaacgtgattatcggcaaccagaaactaactatcaacgacgtcgcccgcgttgctcggaacgggaccttagtaagcctgactaacaacactgatatacttcaaggcattcaggcgtcctgtgattatatcaataacgcagttgagtctggtgaaccaatttacggtgtgacctcaggcttcggcggtatggcgaacgttgctatcagccgtgaacaggcctccgaactgcaaaccaatttggtatggtttctgaaaactggtgctgggaacaaactccctttggcggacgtacgtgcagcaatgctgctgcgcgccaactcgcatatgcgtggcgcgtccggtatccgtctggagctgatcaaacgtatggaaatcttcttgaacgctggtgttactccgtacgtttatgaatttggatctatcggcgcttctggagatctggtcccgctgagctacattacgggttccctgattggccttgacccgagcttcaaggtggatttcaacggcaaagaaatggacgccccgaccgcgttacgccagttaaatctgtctcccctgacacttctgcctaaagaaggtctagctatgatgaatgggacctcagtcatgactggcatcgcagctaactgcgtatacgacacccagatcctgactgcgattgcaatgggtgttcacgctctggatatccaggccctgaacggcaccaaccagtctttccacccgtttatccataactctaagccgcacccaggtcagctgtgggcggctgatcagatgatatcattgctggctaactcgcaactggtacgggacgagctggacggcaaacatgattaccgcgaccacgagctgatccaggatcgttatagcctgcgttgccttccgcagtacctgggtccgattgtggacggtatctcacagatagcaaaacaaatcgaaattgaaattaactccgttactgataaccctctgattgacgtcgataaccaggcgtcgtaccacggcggaaatttcctgggtcagtatgttggcatgggtatggaccaccttcgctactatatcggcctgctggcgaaacacctggatgtgcagattgcgctgctagctagtcccgaatttagcaacggactgccgccatctttattgggcaaccgtgaacgtaaggttaacatgggtctgaaaggtttacaaatctgtggcaattccatcatgccgctgctgacgttctacggcaatagcatcgccgaccgctttccgacccatgcagagcaattcaaccagaatatcaactctcagggctacacctccgcaacgctggcgcgacgtagtgttgatatcttccaaaactacgttgcgattgccctgatgtttggcgtccaggctgtagacctgaggacttataaaaagactggccattacgatgcgcgtgcttgcctctctccggctaccgaacgcctgtattccgccgtgcgtcacgtagttggtcagaaacctacttcagatcgcccatacatctggaacgataacgagcagggtctggatgaacacatcgctcgcatctccgctgacattgccgctggcggagtaattgttcaagctgtacaggatatcctgccgtgcctgcac

SEQ ID NO: 3 - protein, 567 aa, synthetic construct
MKTLSQAQSKTSSQQFSFTGNSSANVIIGNQKLTINDVARVARNGTLVSLTNNTDILQGIQASCDYINNAVESGEPIYGVTSGFGGMANVAISREQASELQTNLVWFLKTGAGNKLPLADVRAAMLLRANSHMRGASGIRLELIKRMEIFLNAGVTPYVYEFGSIGASGDLVPLSYITGSLIGLDPSFKVDFNGKEMDAPTALRQLNLSPLTLLPKEALAMMNGTSVMTGIAANCVYDTQILTAIAMGVHALDIQALNGTNQSFHPFIHNSKPHPGQLWAADQMISLLANSQLVRDELDGKHDYRDHELIQDRYSLRCLPQYLGPIVDGISQIAKQIEIEINSVTDNPLIDVDNQASYHGGNFLGQYVGMGMDHLRYYIGLLAKHLDVQIALLASPEFSNGLPPSLLGNRERKVNMGLKGLQICGNSIMPLLTFYGNSIADRFPTHAEQFNQNINSQGYTSATLARRSVDIFQNYVAIALMFGVQAVDLRTYKKTGHYDARACLSPATERLYSAVRHVVGQKPTSDRPYIWNDNEQGLDEHIARISADIAAGGVIVQAVQDILPCLH

SEQ ID NO: 4 - protein, 523 aa, Rhodobacter sphaeroides
MLAMSPPKPAVELDRHIDLDQAHAVASGGARIVLAPPARDRCRASEARLGAVIREARHVYGLTTGFGPLANRLISGENVRTLQANLVHHLASGVGPVLDWTTARAMVLARLVSIAQGASGASEGTIARLIDLLNSELAPAVPSRGTVGASGDLTPLAHMVLCLQGRGDFLDRDGTRLDGAEGLRRGRLQPLDLSHRDALALVNGTSAMTGIALVNAHACRHLGNWAVALTALLAECLRGRTEAWAAALSDLRPHPGQKDAAARLRARVDGSARVVRHVIAERRLDAGDIGTEPEAGQDAYSLRCAPQVLGAGFDTLAWHDRVLTIELNAVTDNPVFPPDGSVPALHGGNFMGQHVALTSDALATAVTVLAGLAERQIARLTDERLNRGLPPFLHRGPAGLNSGFMGAQVTATALLAEMRATGPASIHSISTNAANQDVVSLGTIAARLCREKIDRWAEILAILALCLAQAAELRCGSGLDGVSPAGKKLVQALREQFPPLETDRPLGQEIAALATHLLQQSPV

SEQ ID NO: 5 - protein, 567 aa, synthetic construct
MKTLSQAQSKTSSQQFSFTGNSSANVIIGNQKLTINDVARVARNGTLVSLTNNTDILQGIQASCDYINNAVESGEPIYGVTSGFGGMANVAISREQASELQHNMVWFLKTGAGNKLPLADVRAAMLLRANSHMRGASGIRLELIKRMEIFLNAGVTPYVYEFGSIGASGDLVPLSYITGSLIGLDPSFKVDFNGKEMDAPTALRQLNLSPLTLLPKEALAMMNGTSVMTGIAANCVYDTQILTAIAMGVHALDIQALNGTNQSFHPFIHNSKPHPGQLWAADQMISLLANSQLVRDELDGKHDYRDHELIQDRYSLRCLPQYLGPIVDGISQIAKQIEIEINSVTDNPLIDVDNQASYHGGNFLGQYVGMGMDHLRYYIGLLAKHLDVQIALLASPEFSNGLPPSLLGNRERKVNMGLKGLQICGNSIMPLLTFYGNSIADRFPTHAEQFNQNINSQGYTSATLARRSVDIFQNYVAIALMFGVQAVDLRTYKKTGHYDARACLSPATERLYSAVRHVVGQKPTSDRPYIWNDNEQGLDEHIARISADIAAGGVIVQAVQDILPCLH

SEQ ID NO: 6 - protein, 567 aa, synthetic construct
MKTLSQAQSKTSSQQFSFTGNSSANVIIGNQKLTINDVARVARNGTLVSLTNNTDILQGIQASCDYINNAVESGEPIYGVTSGFGGMANVAISREQASELQTNMVWFTKTGAGNKLPLADVRAAMLLRANSHMRGASGIRLELIKRMEIFLNAGVTPYVYEFGSIGASGDLVPLSYITGSLIGLDPSFKVDFNGKEMDAPTALRQLNLSPLTLLPKEALAMMNGTSVMTGIAANCVYDTQILTAIAMGVHALDIQALNGTNQSFHPFIHNSKPHPGQLWAADQMISLLANSQLVRDELDGKHDYRDHELIQDRYSLRCLPQYLGPIVDGISQIAKQIEIEINSVTDNPLIDVDNQASYHGGNFLGQYVGMGMDHLRYYIGLLAKHLDVQIALLASPEFSNGLPPSLLGNRERKVNMGLKGLQICGNSIMPLLTFYGNSIADRFPTHAEQFNQNINSQGYTSATLARRSVDIFQNYVAIALMFGVQAVDLRTYKKTGHYDARACLSPATERLYSAVRHVVGQKPTSDRPYIWNDNEQGLDEHIARISADIAAGGVIVQAVQDILPCLH

SEQ ID NO: 7 - protein, 567 aa, synthetic construct
MKTLSQAQSKTSSQQFSFTGNSSANVIIGNQKLTINDVARVARNGTLVSLTNNTDILQGIQASCDYINNAVESGEPIYGVTSGFGGMANVAISREQASELQKNLVWFLKTGAGNKLPLADVRAAMLLRANSHMRGASGIRLELIKRMEIFLNAGVTPYVYEFGSIGASGDLVPLSYITGSLIGLDPSFKVDFNGKEMDAPTALRQLNLSPLTLLPKEGLAMMNGTSVMTGIAANCVYDTQILTAIAMGVHALDIQALNGTNQSFHPFIHNSKPHPGQLWAADQMISLLANSQLVRDELDGKHDYRDHELIQDRYSLRCLPQYLGPIVDGISQIAKQIEIEINSVTDNPLIDVDNQASYHGGNFLGQYVGMGMDHLRYYIGLLAKHLDVQIALLASPEFSNGLPPSLLGNRERKVNMGLKGLQICGNSIMPLLTFYGNSIADRFPTHAEQFNQNINSQGYTSATLARRSVDIFQNYVAIALMFGVQAVDLRTYKKTGHYDARACLSPATERLYSAVRHVVGQKPTSDRPYIWNDNEQGLDEHIARISADIAAGGVIVQAVQDILPCLH

SEQ ID NO: 8 - protein, 567 aa, synthetic construct
MKTLSQAQSKTSSQQFSFTGNSSANVIIGNQKLTINDVARVARNGTLVSLTNNTDILQGIQASCDYINNAVESGEPIYGVTSGFGGMANVAISREQASELQENMVWFTKTGAGNKLPLADVRAAMLLRANSHMRGASGIRLELIKRMEIFLNAGVTPYVYEFGSIGASGDLVPLSYITGSLIGLDPSFKVDFNGKEMDAPTALRQLNLSPLTLLPKEALAMLNGTSVMTGIAANCVYDTQILTAIAMGVHALDIQALNGTNQSFHPFIHNSKPHPGQLWAADQMISLLANSQLVRDELDGKHDYRDHELIQDRYSLRCLPQYLGPIVDGISQIAKQIEIEINSVTDNPLIDVDNQASYHGGNFLGQYVGMGMDHLRYYIGLLAKHLDVQIALLASPEFSNGLPPSLLGNRERKVNMGLKGLQICGNSIMPLLTFYGNSIADRFPTHAEQFNQNINSQGYTSATLARRSVDIFQNYVAIALMFGVQAVDLRTYKKTGHYDARACLSPATERLYSAVRHVVGQKPTSDRPYIWNDNEQGLDEHIARISADIAAGGVIVQAVQDILPCLH

SEQ ID NO: 9 - protein, 567 aa, synthetic construct
MKTLSQAQSKTSSQQFSFTGNSSANVIIGNQKLTINDVARVARNGTLVSLTNNTDILQGIQASCDYINNAVESGEPIYGVTSGFGGMANVAISREQASELQSNLVWFLKTGAGNKLPLADVRAAMLLRANSHMRGASGIRLELIKRMEIFLNAGVTPYVYEFGSIGASGDLVPLSYITGSLIGLDPSFKVDFNGKEMDAPTALRQLNLSPLTLLPKEGLAMLNGTSVMTGIAANCVYDTQILTAIAMGVHALDIQALNGTNQSFHPFIHNSKPHPGQLWAADQMISLLANSQLVRDELDGKHDYRDHELIQDRYSLRCLPQYLGPIVDGISQIAKQIEIEINSVTDNPLIDVDNQASYHGGNFLGQYVGMGMDHLRYYIGLLAKHLDVQIALLASPEFSNGLPPSLLGNRERKVNMGLKGLQICGNSIMPLLTFYGNSIADRFPTHAEQFNQNINSQGYTSATLARRSVDIFQNYVAIALMFGVQAVDLRTYKKTGHYDARACLSPATERLYSAVRHVVGQKPTSDRPYIWNDNEQGLDEHIARISADIAAGGVIVQAVQDILPCLH

SEQ ID NO: 10 - protein, 567 aa, synthetic construct
MKTLSQAQSKTSSQQFSFTGNSSANVIIGNQKLTINDVARVARNGTLVSLTNNTDILQGIQASCDYINNAVESGEPIYGVTSGFGGMANVAISREQASELQHNMVWFLKTGAGNKLPLADVRAAMLLRANSHMRGASGIRLELIKRMEIFLNAGVTPYVYEFGSIGASGDLVPLSYITGSLIGLDPSFKVDFNGKEMDAPTALRQLNLSPLTLLPKEGIAMMNGTSVMTGIAANCVYDTQILTAIAMGVHALDIQALNGTNQSFHPFIHNSKPHPGQLWAADQMISLLANSQLVRDELDGKHDYRDHELIQDRYSLRCLPQYLGPIVDGISQIAKQIEIEINSVTDNPLIDVDNQASYHGGNFLGQYVGMGMDHLRYYIGLLAKHLDVQIALLASPEFSNGLPPSLLGNRERKVNMGLKGLQICGNSIMPLLTFYGNSIADRFPTHAEQFNQNINSQGYTSATLARRSVDIFQNYVAIALMFGVQAVDLRTYKKTGHYDARACLSPATERLYSAVRHVVGQKPTSDRPYIWNDNEQGLDEHIARISADIAAGGVIVQAVQDILPCLH

SEQ ID NO: 11 - protein, 567 aa, synthetic construct
MKTLSQAQSKTSSQQFSFTGNSSANVIIGNQKLTINDVARVARNGTLVSLTNNTDILQGIQASCDYINNAVESGEPIYGVTSGFGGMANVAISREQASELQHNMVWFTKTGAGNKLPLADVRAAMLLRANSHMRGASGIRLELIKRMEIFLNAGVTPYVYEFGSIGASGDLVPLSYITGSLIGLDPSFKVDFNGKEMDAPTALRQLNLSPLTLLPKEALAMVNGTSVMTGIAANCVYDTQILTAIAMGVHALDIQALNGTNQSFHPFIHNSKPHPGQLWAADQMISLLANSQLVRDELDGKHDYRDHELIQDRYSLRCLPQYLGPIVDGISQIAKQIEIEINSVTDNPLIDVDNQASYHGGNFLGQYVGMGMDHLRYYIGLLAKHLDVQIALLASPEFSNGLPPSLLGNRERKVNMGLKGLQICGNSIMPLLTFYGNSIADRFPTHAEQFNQNINSQGYTSATLARRSVDIFQNYVAIALMFGVQAVDLRTYKKTGHYDARACLSPATERLYSAVRHVVGQKPTSDRPYIWNDNEQGLDEHIARISADIAAGGVIVQAVQDILPCLH

SEQ ID NO: 12 - protein, 567 aa, synthetic construct
MKTLSQAQSKTSSQQFSFTGNSSANVIIGNQKLTINDVARVARNGTLVSLTNNTDILQGIQASCDYINNAVESGEPIYGVTSGFGGMANVAISREQASELQKNLVWFLKTGAGNKLPLADVRAAMLLRANSHMRGASGIRLELIKRMEIFLNAGVTPYVYEFGSIGASGDLVPLSYITGSLIGLDPSFKVDFNGKEMDAPTALRQLNLSPLTLLPKEALAMMNGTSVMTGIAANCVYDTQILTAIAMGVHALDIQALNGTNQSFHPFIHNSKPHPGQLWAADQMISLLANSQLVRDELDGKHDYRDHELIQDRYSLRCLPQYLGPIVDGISQIAKQIEIEINSVTDNPLIDVDNQASYHGGNFLGQYVGMGMDHLRYYIGLLAKHLDVQIALLASPEFSNGLPPSLLGNRERKVNMGLKGLQICGNSIMPLLTFYGNSIADRFPTHAEQFNQNINSQGYTSATLARRSVDIFQNYVAIALMFGVQAVDLRTYKKTGHYDARACLSPATERLYSAVRHVVGQKPTSDRPYIWNDNEQGLDEHIARISADIAAGGVIVQAVQDILPCLH

SEQ ID NO: 13 - protein, 567 aa, synthetic construct
MKTLSQAQSKTSSQQFSFTGNSSANVIIGNQKLTINDVARVARNGTLVSLTNNTDILQGIQASCDYINNAVESGEPIYGVTSGFGGMANVAISREQASELQSNLVWFTKTGAGNKLPLADVRAAMLLRANSHMRGASGIRLELIKRMEIFLNAGVTPYVYEFGSIGASGDLVPLSYITGSLIGLDPSFKVDFNGKEMDAPTALRQLNLSPLTLLPKESLAMLNGTSVMTGIAANCVYDTQILTAIAMGVHALDIQALNGTNQSFHPFIHNSKPHPGQLWAADQMISLLANSQLVRDELDGKHDYRDHELIQDRYSLRCLPQYLGPIVDGISQIAKQIEIEINSVTDNPLIDVDNQASYHGGNFLGQYVGMGMDHLRYYIGLLAKHLDVQIALLASPEFSNGLPPSLLGNRERKVNMGLKGLQICGNSIMPLLTFYGNSIADRFPTHAEQFNQNINSQGYTSATLARRSVDIFQNYVAIALMFGVQAVDLRTYKKTGHYDARACLSPATERLYSAVRHVVGQKPTSDRPYIWNDNEQGLDEHIARISADIAAGGVIVQAVQDILPCLH

SEQ ID NO: 14 - protein, 567 aa, synthetic construct
MKTLSQAQSKTSSQQFSFTGNSSANVIIGNQKLTINDVARVARNGTLVSLTNNTDILQGIQASCDYINNAVESGEPIYGVTSGFGGMANVAISREQASELQENLVWFTKTGAGNKLPLADVRAAMLLRANSHMRGASGIRLELIKRMEIFLNAGVTPYVYEFGSIGASGDLVPLSYITGSLIGLDPSFKVDFNGKEMDAPTALRQLNLSPLTLLPKEGLAMINGTSVMTGIAANCVYDTQILTAIAMGVHALDIQALNGTNQSFHPFIHNSKPHPGQLWAADQMISLLANSQLVRDELDGKHDYRDHELIQDRYSLRCLPQYLGPIVDGISQIAKQIEIEINSVTDNPLIDVDNQASYHGGNFLGQYVGMGMDHLRYYIGLLAKHLDVQIALLASPEFSNGLPPSLLGNRERKVNMGLKGLQICGNSIMPLLTFYGNSIADRFPTHAEQFNQNINSQGYTSATLARRSVDIFQNYVAIALMFGVQAVDLRTYKKTGHYDARACLSPATERLYSAVRHVVGQKPTSDRPYIWNDNEQGLDEHIARISADIAAGGVIVQAVQDILPCLH

SEQ ID NO: 15 - protein, 567 aa, synthetic construct
MKTLSQAQSKTSSQQFSFTGNSSANVIIGNQKLTINDVARVARNGTLVSLTNNTDILQGIQASCDYINNAVESGEPIYGVTSGFGGMANVAISREQASELQENLVWFLKTGAGNKLPLADVRAAMLLRANSHMRGASGIRLELIKRMEIFLNAGVTPYVYEFGSIGASGDLVPLSYITGSLIGLDPSFKVDFNGKEMDAPTALRQLNLSPLTLLPKESLAMMNGTSVMTGIAANCVYDTQILTAIAMGVHALDIQALNGTNQSFHPFIHNSKPHPGQLWAADQMISLLANSQLVRDELDGKHDYRDHELIQDRYSLRCLPQYLGPIVDGISQIAKQIEIEINSVTDNPLIDVDNQASYHGGNFLGQYVGMGMDHLRYYIGLLAKHLDVQIALLASPEFSNGLPPSLLGNRERKVNMGLKGLQICGNSIMPLLTFYGNSIADRFPTHAEQFNQNINSQGYTSATLARRSVDIFQNYVAIALMFGVQAVDLRTYKKTGHYDARACLSPATERLYSAVRHVVGQKPTSDRPYIWNDNEQGLDEHIARISADIAAGGVIVQAVQDILPCLH

SEQ ID NO: 16 - protein, 567 aa, synthetic construct
MKTLSQAQSKTSSQQFSFTGNSSANVIIGNQKLTINDVARVARNGTLVSLTNNTDILQGIQASCDYINNAVESGEPIYGVTSGFGGMANVAISREQASELQKNIVWFTKTGAGNKLPLADVRAAMLLRANSHMRGASGIRLELIKRMEIFLNAGVTPYVYEFGSIGASGDLVPLSYITGSLIGLDPSFKVDFNGKEMDAPTALRQLNLSPLTLLPKEGLAMLNGTSVMTGIAANCVYDTQILTAIAMGVHALDIQALNGTNQSFHPFIHNSKPHPGQLWAADQMISLLANSQLVRDELDGKHDYRDHELIQDRYSLRCLPQYLGPIVDGISQIAKQIEIEINSVTDNPLIDVDNQASYHGGNFLGQYVGMGMDHLRYYIGLLAKHLDVQIALLASPEFSNGLPPSLLGNRERKVNMGLKGLQICGNSIMPLLTFYGNSIADRFPTHAEQFNQNINSQGYTSATLARRSVDIFQNYVAIALMFGVQAVDLRTYKKTGHYDARACLSPATERLYSAVRHVVGQKPTSDRPYIWNDNEQGLDEHIARISADIAAGGVIVQAVQDILPCLH

SEQ ID NO: 17 - protein, 567 aa, synthetic construct
MKTLSQAQSKTSSQQFSFTGNSSANVIIGNQKLTINDVARVARNGTLVSLTNNTDILQGIQASCDYINNAVESGEPIYGVTSGFGGMANVAISREQASELQSNMVWFMKTGAGNKLPLADVRAAMLLRANSHMRGASGIRLELIKRMEIFLNAGVTPYVYEFGSIGASGDLVPLSYITGSLIGLDPSFKVDFNGKEMDAPTALRQLNLSPLTLLPKEGLAMMNGTSVMTGIAANCVYDTQILTAIAMGVHALDIQALNGTNQSFHPFIHNSKPHPGQLWAADQMISLLANSQLVRDELDGKHDYRDHELIQDRYSLRCLPQYLGPIVDGISQIAKQIEIEINSVTDNPLIDVDNQASYHGGNFLGQYVGMGMDHLRYYIGLLAKHLDVQIALLASPEFSNGLPPSLLGNRERKVNMGLKGLQICGNSIMPLLTFYGNSIADRFPTHAEQFNQNINSQGYTSATLARRSVDIFQNYVAIALMFGVQAVDLRTYKKTGHYDARACLSPATERLYSAVRHVVGQKPTSDRPYIWNDNEQGLDEHIARISADIAAGGVIVQAVQDILPCLH

SEQ ID NO: 18 - protein, 567 aa, synthetic construct
MKTLSQAQSKTSSQQFSFTGNSSANVIIGNQKLTINDVARVARNGTLVSLTNNTDILQGIQASCDYINNAVESGEPIYGVTSGFGGMANVAISREQASELQKNLVWFLKTGAGNKLPLADVRAAMLLRANSHMRGASGIRLELIKRMEIFLNAGVTPYVYEFGSIGASGDLVPLSYITGSLIGLDPSFKVDFNGKEMDAPTALRQLNLSPLTLLPKEALAMTNGTSVMTGIAANCVYDTQILTAIAMGVHALDIQALNGTNQSFHPFIHNSKPHPGQLWAADQMISLLANSQLVRDELDGKHDYRDHELIQDRYSLRCLPQYLGPIVDGISQIAKQIEIEINSVTDNPLIDVDNQASYHGGNFLGQYVGMGMDHLRYYIGLLAKHLDVQIALLASPEFSNGLPPSLLGNRERKVNMGLKGLQICGNSIMPLLTFYGNSIADRFPTHAEQFNQNINSQGYTSATLARRSVDIFQNYVAIALMFGVQAVDLRTYKKTGHYDARACLSPATERLYSAVRHVVGQKPTSDRPYIWNDNEQGLDEHIARISADIAAGGVIVQAVQDILPCLH

SEQ ID NO: 19 - protein, 567 aa, synthetic construct
MKTLSQAQSKTSSQQFSFTGNSSANVIIGNQKLTINDVARVARNGTLVSLTNNTDILQGIQASCDYINNAVESGEPIYGVTSGFGGMANVAISREQASELQSNMVWFLKTGAGNKLPLADVRAAMLLRANSHMRGASGIRLELIKRMEIFLNAGVTPYVYEFGSIGASGDLVPLSYITGSLIGLDPSFKVDFNGKEMDAPTALRQLNLSPLTLLPKEGIAMLNGTSVMTGIAANCVYDTQILTAIAMGVHALDIQALNGTNQSFHPFIHNSKPHPGQLWAADQMISLLANSQLVRDELDGKHDYRDHELIQDRYSLRCLPQYLGPIVDGISQIAKQIEIEINSVTDNPLIDVDNQASYHGGNFLGQYVGMGMDHLRYYIGLLAKHLDVQIALLASPEFSNGLPPSLLGNRERKVNMGLKGLQICGNSIMPLLTFYGNSIADRFPTHAEQFNQNINSQGYTSATLARRSVDIFQNYVAIALMFGVQAVDLRTYKKTGHYDARACLSPATERLYSAVRHVVGQKPTSDRPYIWNDNEQGLDEHIARISADIAAGGVIVQAVQDILPCLH

SEQ ID NO: 20 - protein, 567 aa, synthetic construct
MKTLSQAQSKTSSQQFSFTGNSSANVIIGNQKLTINDVARVARNGTLVSLTNNTDILQGIQASCDYINNAVESGEPIYGVTSGFGGMANVAISREQASELQHNLVWFTKTGAGNKLPLADVRAAMLLRANSHMRGASGIRLELIKRMEIFLNAGVTPYVYEFGSIGASGDLVPLSYITGSLIGLDPSFKVDFNGKEMDAPTALRQLNLSPLTLLPKEGLAMMNGTSVMTGIAANCVYDTQILTAIAMGVHALDIQALNGTNQSFHPFIHNSKPHPGQLWAADQMISLLANSQLVRDELDGKHDYRDHELIQDRYSLRCLPQYLGPIVDGISQIAKQIEIEINSVTDNPLIDVDNQASYHGGNFLGQYVGMGMDHLRYYIGLLAKHLDVQIALLASPEFSNGLPPSLLGNRERKVNMGLKGLQICGNSIMPLLTFYGNSIADRFPTHAEQFNQNINSQGYTSATLARRSVDIFQNYVAIALMFGVQAVDLRTYKKTGHYDARACLSPATERLYSAVRHVVGQKPTSDRPYIWNDNEQGLDEHIARISADIAAGGVIVQAVQDILPCLH

SEQ ID NO: 21 - protein, 567 aa, synthetic construct
MKTLSQAQSKTSSQQFSFTGNSSANVIIGNQKLTINDVARVARNGTLVSLTNNTDILQGIQASCDYINNAVESGEPIYGVTSGFGGMANVAISREQASELQTNMVWFLKTGAGNKLPLADVRAAMLLRANSHMRGASGIRLELIKRMEIFLNAGVTPYVYEFGSIGASGDLVPLSYITGSLIGLDPSFKVDFNGKEMDAPTALRQLNLSPLTLLPKEGLAMVNGTSVMTGIAANCVYDTQILTAIAMGVHALDIQALNGTNQSFHPFIHNSKPHPGQLWAADQMISLLANSQLVRDELDGKHDYRDHELIQDRYSLRCLPQYLGPIVDGISQIAKQIEIEINSVTDNPLIDVDNQASYHGGNFLGQYVGMGMDHLRYYIGLLAKHLDVQIALLASPEFSNGLPPSLLGNRERKVNMGLKGLQICGNSIMPLLTFYGNSIADRFPTHAEQFNQNINSQGYTSATLARRSVDIFQNYVAIALMFGVQAVDLRTYKKTGHYDARACLSPATERLYSAVRHVVGQKPTSDRPYIWNDNEQGLDEHIARISADIAAGGVIVQAVQDILPCLH

SEQ ID NO: 22 - protein, 567 aa, synthetic construct
MKTLSQAQSKTSSQQFSFTGNSSANVIIGNQKLTINDVARVARNGTLVSLTNNTDILQGIQASCDYINNAVESGEPIYGVTSGFGGMANVAISREQASELQHNMVWFLKTGAGNKLPLADVRAAMLLRANSHMRGASGIRLELIKRMEIFLNAGVTPYVYEFGSIGASGDLVPLSYITGSLIGLDPSFKVDFNGKEMDAPTALRQLNLSPLTLLPKEALAMTNGTSVMTGIAANCVYDTQILTAIAMGVHALDIQALNGTNQSFHPFIHNSKPHPGQLWAADQMISLLANSQLVRDELDGKHDYRDHELIQDRYSLRCLPQYLGPIVDGISQIAKQIEIEINSVTDNPLIDVDNQASYHGGNFLGQYVGMGMDHLRYYIGLLAKHLDVQIALLASPEFSNGLPPSLLGNRERKVNMGLKGLQICGNSIMPLLTFYGNSIADRFPTHAEQFNQNINSQGYTSATLARRSVDIFQNYVAIALMFGVQAVDLRTYKKTGHYDARACLSPATERLYSAVRHVVGQKPTSDRPYIWNDNEQGLDEHIARISADIAAGGVIVQAVQDILPCLH

SEQ ID NO: 23 - protein, 567 aa, synthetic construct
MKTLSQAQSKTSSQQFSFTGNSSANVIIGNQKLTINDVARVARNGTLVSLTNNTDILQGIQASCDYINNAVESGEPIYGVTSGFGGMANVAISREQASELQTNLVWFLKTGAGNKLPLADVRAAMLLRANSHMRGASGIRLELIKRMEIFLNAGVTPYVYEFGSIGASGDLVPLSYITGSLIGLDPSFKVDFNGKEMDAPTALRQLNLSPLTLLPKEGLAMLNGTSVMTGIAANCVYDTQILTAIAMGVHALDIQALNGTNQSFHPFIHNSKPHPGQLWAADQMISLLANSQLVRDELDGKHDYRDHELIQDRYSLRCLPQYLGPIVDGISQIAKQIEIEINSVTDNPLIDVDNQASYHGGNFLGQYVGMGMDHLRYYIGLLAKHLDVQIALLASPEFSNGLPPSLLGNRERKVNMGLKGLQICGNSIMPLLTFYGNSIADRFPTHAEQFNQNINSQGYTSATLARRSVDIFQNYVAIALMFGVQAVDLRTYKKTGHYDARACLSPATERLYSAVRHVVGQKPTSDRPYIWNDNEQGLDEHIARISADIAAGGVIVQAVQDILPCLH

SEQ ID NO: 24 - protein, 567 aa, synthetic construct
MKTLSQAQSKTSSQQFSFTGNSSANVIIGNQKLTINDVARVARNGTLVSLTNNTDILQGIQASCDYINNAVESGEPIYGVTSGFGGMANVAISREQASELQSNLVWFTKTGAGNKLPLADVRAAMLLRANSHMRGASGIRLELIKRMEIFLNAGVTPYVYEFGSIGASGDLVPLSYITGSLIGLDPSFKVDFNGKEMDAPTALRQLNLSPLTLLPKEGLAMLNGTSVMTGIAANCVYDTQILTAIAMGVHALDIQALNGTNQSFHPFIHNSKPHPGQLWAADQMISLLANSQLVRDELDGKHDYRDHELIQDRYSLRCLPQYLGPIVDGISQIAKQIEIEINSVTDNPLIDVDNQASYHGGNFLGQYVGMGMDHLRYYIGLLAKHLDVQIALLASPEFSNGLPPSLLGNRERKVNMGLKGLQICGNSIMPLLTFYGNSIADRFPTHAEQFNQNINSQGYTSATLARRSVDIFQNYVAIALMFGVQAVDLRTYKKTGHYDARACLSPATERLYSAVRHVVGQKPTSDRPYIWNDNEQGLDEHIARISADIAAGGVIVQAVQDILPCLH

SEQ ID NO: 25 - protein, 567 aa, synthetic construct
MKTLSQAQSKTSSQQFSFTGNSSANVIIGNQKLTINDVARVARNGTLVSLTNNTDILQGIQASCDYINNAVESGEPIYGVTSGFGGMANVAISREQASELQSNLVWFVKTGAGNKLPLADVRAAMLLRANSHMRGASGIRLELIKRMEIFLNAGVTPYVYEFGSIGASGDLVPLSYITGSLIGLDPSFKVDFNGKEMDAPTALRQLNLSPLTLLPKEALAMMNGTSVMTGIAANCVYDTQILTAIAMGVHALDIQALNGTNQSFHPFIHNSKPHPGQLWAADQMISLLANSQLVRDELDGKHDYRDHELIQDRYSLRCLPQYLGPIVDGISQIAKQIEIEINSVTDNPLIDVDNQASYHGGNFLGQYVGMGMDHLRYYIGLLAKHLDVQIALLASPEFSNGLPPSLLGNRERKVNMGLKGLQICGNSIMPLLTFYGNSIADRFPTHAEQFNQNINSQGYTSATLARRSVDIFQNYVAIALMFGVQAVDLRTYKKTGHYDARACLSPATERLYSAVRHVVGQKPTSDRPYIWNDNEQGLDEHIARISADIAAGGVIVQAVQDILPCLH

SEQ ID NO: 26 - protein, 567 aa, synthetic construct
MKTLSQAQSKTSSQQFSFTGNSSANVIIGNQKLTINDVARVARNGTLVSLTNNTDILQGIQASCDYINNAVESGEPIYGVTSGFGGMANVAISREQASELQTNAVWFTKTGAGNKLPLADVRAAMLLRANSHMRGASGIRLELIKRMEIFLNAGVTPYVYEFGSIGASGDLVPLSYITGSLIGLDPSFKVDFNGKEMDAPTALRQLNLSPLTLLPKEALAMMNGTSVMTGIAANCVYDTQILTAIAMGVHALDIQALNGTNQSFHPFIHNSKPHPGQLWAADQMISLLANSQLVRDELDGKHDYRDHELIQDRYSLRCLPQYLGPIVDGISQIAKQIEIEINSVTDNPLIDVDNQASYHGGNFLGQYVGMGMDHLRYYIGLLAKHLDVQIALLASPEFSNGLPPSLLGNRERKVNMGLKGLQICGNSIMPLLTFYGNSIADRFPTHAEQFNQNINSQGYTSATLARRSVDIFQNYVAIALMFGVQAVDLRTYKKTGHYDARACLSPATERLYSAVRHVVGQKPTSDRPYIWNDNEQGLDEHIARISADIAAGGVIVQAVQDILPCLH

SEQ ID NO: 27 - protein, 567 aa, synthetic construct
MKTLSQAQSKTSSQQFSFTGNSSANVIIGNQKLTINDVARVARNGTLVSLTNNTDILQGIQASCDYINNAVESGEPIYGVTSGFGGMANVAISREQASELQTNVVWFTKTGAGNKLPLADVRAAMLLRANSHMRGASGIRLELIKRMEIFLNAGVTPYVYEFGSIGASGDLVPLSYITGSLIGLDPSFKVDFNGKEMDAPTALRQLNLSPLTLLPKEGLAMMNGTSVMTGIAANCVYDTQILTAIAMGVHALDIQALNGTNQSFHPFIHNSKPHPGQLWAADQMISLLANSQLVRDELDGKHDYRDHELIQDRYSLRCLPQYLGPIVDGISQIAKQIEIEINSVTDNPLIDVDNQASYHGGNFLGQYVGMGMDHLRYYIGLLAKHLDVQIALLASPEFSNGLPPSLLGNRERKVNMGLKGLQICGNSIMPLLTFYGNSIADRFPTHAEQFNQNINSQGYTSATLARRSVDIFQNYVAIALMFGVQAVDLRTYKKTGHYDARACLSPATERLYSAVRHVVGQKPTSDRPYIWNDNEQGLDEHIARISADIAAGGVIVQAVQDILPCLH

SEQ ID NO: 28 - protein, 567 aa, synthetic construct
MKTLSQAQSKTSSQQFSFTGNSSANVIIGNQKLTINDVARVARNGTLVSLTNNTDILQGIQASCDYINNAVESGEPIYGVTSGFGGMANVAISREQASELQKNLVWFVKTGAGNKLPLADVRAAMLLRANSHMRGASGIRLELIKRMEIFLNAGVTPYVYEFGSIGASGDLVPLSYITGSLIGLDPSFKVDFNGKEMDAPTALRQLNLSPLTLLPKEGLAMLNGTSVMTGIAANCVYDTQILTAIAMGVHALDIQALNGTNQSFHPFIHNSKPHPGQLWAADQMISLLANSQLVRDELDGKHDYRDHELIQDRYSLRCLPQYLGPIVDGISQIAKQIEIEINSVTDNPLIDVDNQASYHGGNFLGQYVGMGMDHLRYYIGLLAKHLDVQIALLASPEFSNGLPPSLLGNRERKVNMGLKGLQICGNSIMPLLTFYGNSIADRFPTHAEQFNQNINSQGYTSATLARRSVDIFQNYVAIALMFGVQAVDLRTYKKTGHYDARACLSPATERLYSAVRHVVGQKPTSDRPYIWNDNEQGLDEHIARISADIAAGGVIVQAVQDILPCLH

SEQ ID NO: 29 - protein, 567 aa, synthetic construct
MKTLSQAQSKTSSQQFSFTGNSSANVIIGNQKLTINDVARVARNGTLVSLTNNTDILQGIQASCDYINNAVESGEPIYGVTSGFGGMANVAISREQASELQTNAVWFQKTGAGNKLPLADVRAAMLLRANSHMRGASGIRLELIKRMEIFLNAGVTPYVYEFGSIGASGDLVPLSYITGSLIGLDPSFKVDFNGKEMDAPTALRQLNLSPLTLLPKEGIAMNNGTSVMTGIAANCVYDTQILTAIAMGVHALDIQALNGTNQSFHPFIHNSKPHPGQLWAADQMISLLANSQLVRDELDGKHDYRDHELIQDRYSLRCLPQYLGPIVDGISQIAKQIEIEINSVTDNPLIDVDNQASYHGGNFLGQYVGMGMDHLRYYIGLLAKHLDVQIALLASPEFSNGLPPSLLGNRERKVNMGLKGLQICGNSIMPLLTFYGNSIADRFPTHAEQFNQNINSQGYTSATLARRSVDIFQNYVAIALMFGVQAVDLRTYKKTGHYDARACLSPATERLYSAVRHVVGQKPTSDRPYIWNDNEQGLDEHIARISADIAAGGVIVQAVQDILPCLH

SEQ ID NO: 30 - protein, 567 aa, synthetic construct
MKTLSQAQSKTSSQQFSFTGNSSANVIIGNQKLTINDVARVARNGTLVSLTNNTDILQGIQASCDYINNAVESGEPIYGVTSGFGGMANVAISREQASELQSNLVWFQKTGAGNKLPLADVRAAMLLRANSHMRGASGIRLELIKRMEIFLNAGVTPYVYEFGSIGASGDLVPLSYITGSLIGLDPSFKVDFNGKEMDAPTALRQLNLSPLTLLPKEAIAMMNGTSVMTGIAANCVYDTQILTAIAMGVHALDIQALNGTNQSFHPFIHNSKPHPGQLWAADQMISLLANSQLVRDELDGKHDYRDHELIQDRYSLRCLPQYLGPIVDGISQIAKQIEIEINSVTDNPLIDVDNQASYHGGNFLGQYVGMGMDHLRYYIGLLAKHLDVQIALLASPEFSNGLPPSLLGNRERKVNMGLKGLQICGNSIMPLLTFYGNSIADRFPTHAEQFNQNINSQGYTSATLARRSVDIFQNYVAIALMFGVQAVDLRTYKKTGHYDARACLSPATERLYSAVRHVVGQKPTSDRPYIWNDNEQGLDEHIARISADIAAGGVIVQAVQDILPCLH

SEQ ID NO: 31 - protein, 567 aa, synthetic construct
MKTLSQAQSKTSSQQFSFTGNSSANVIIGNQKLTINDVARVARNGTLVSLTNNTDILQGIQASCDYINNAVESGEPIYGVTSGFGGMANVAISREQASELQHNMVWFMKTGAGNKLPLADVRAAMLLRANSHMRGASGIRLELIKRMEIFLNAGVTPYVYEFGSIGASGDLVPLSYITGSLIGLDPSFKVDFNGKEMDAPTALRQLNLSPLTLLPKEGIAMLNGTSVMTGIAANCVYDTQILTAIAMGVHALDIQALNGTNQSFHPFIHNSKPHPGQLWAADQMISLLANSQLVRDELDGKHDYRDHELIQDRYSLRCLPQYLGPIVDGISQIAKQIEIEINSVTDNPLIDVDNQASYHGGNFLGQYVGMGMDHLRYYIGLLAKHLDVQIALLASPEFSNGLPPSLLGNRERKVNMGLKGLQICGNSIMPLLTFYGNSIADRFPTHAEQFNQNINSQGYTSATLARRSVDIFQNYVAIALMFGVQAVDLRTYKKTGHYDARACLSPATERLYSAVRHVVGQKPTSDRPYIWNDNEQGLDEHIARISADIAAGGVIVQAVQDILPCLH

SEQ ID NO: 32 - protein, 567 aa, synthetic construct
MKTLSQAQSKTSSQQFSFTGNSSANVIIGNQKLTINDVARVARNGTLVSLTNNTDILQGIQASCDYINNAVESGEPIYGVTSGFGGMANVAISREQASELQENLVWYMKTGAGNKLPLADVRAAMLLRANSHMRGASGIRLELIKRMEIFLNAGVTPYVYEFGSIGASGDLVPLSYITGSLIGLDPSFKVDFNGKEMDAPTALRQLNLSPLTLLPKESIAMNNGTSVMTGIAANCVYDTQILTAIAMGVHALDIQALNGTNQSFHPFIHNSKPHPGQLWAADQMISLLANSQLVRDELDGKHDYRDHELIQDRYSLRCLPQYLGPIVDGISQIAKQIEIEINSVTDNPLIDVDNQASYHGGNFLGQYVGMGMDHLRYYIGLLAKHLDVQIALLASPEFSNGLPPSLLGNRERKVNMGLKGLQICGNSIMPLLTFYGNSIADRFPTHAEQFNQNINSQGYTSATLARRSVDIFQNYVAIALMFGVQAVDLRTYKKTGHYDARACLSPATERLYSAVRHVVGQKPTSDRPYIWNDNEQGLDEHIARISADIAAGGVIVQAVQDILPCLH

SEQ ID NO: 33 - protein, 567 aa, synthetic construct
MKTLSQAQSKTSSQQFSFTGNSSANVIIGNQKLTINDVARVARNGTLVSLTNNTDILQGIQASCDYINNAVESGEPIYGVTSGFGGMANVAISREQASELQTNIVWFHKTGAGNKLPLADVRAAMLLRANSHMRGASGIRLELIKRMEIFLNAGVTPYVYEFGSIGASGDLVPLSYITGSLIGLDPSFKVDFNGKEMDAPTALRQLNLSPLTLLPKEAIAMVNGTSVMTGIAANCVYDTQILTAIAMGVHALDIQALNGTNQSFHPFIHNSKPHPGQLWAADQMISLLANSQLVRDELDGKHDYRDHELIQDRYSLRCLPQYLGPIVDGISQIAKQIEIEINSVTDNPLIDVDNQASYHGGNFLGQYVGMGMDHLRYYIGLLAKHLDVQIALLASPEFSNGLPPSLLGNRERKVNMGLKGLQICGNSIMPLLTFYGNSIADRFPTHAEQFNQNINSQGYTSATLARRSVDIFQNYVAIALMFGVQAVDLRTYKKTGHYDARACLSPATERLYSAVRHVVGQKPTSDRPYIWNDNEQGLDEHIARISADIAAGGVIVQAVQDILPCLH

SEQ ID NO: 34 - protein, 567 aa, synthetic construct
MKTLSQAQSKTSSQQFSFTGNSSANVIIGNQKLTINDVARVARNGTLVSLTNNTDILQGIQASCDYINNAVESGEPIYGVTSGFGGMANVAISREQASELQENMVWYLKTGAGNKLPLADVRAAMLLRANSHMRGASGIRLELIKRMEIFLNAGVTPYVYEFGSIGASGDLVPLSYITGSLIGLDPSFKVDFNGKEMDAPTALRQLNLSPLTLLPKEGLAMINGTSVMTGIAANCVYDTQILTAIAMGVHALDIQALNGTNQSFHPFIHNSKPHPGQLWAADQMISLLANSQLVRDELDGKHDYRDHELIQDRYSLRCLPQYLGPIVDGISQIAKQIEIEINSVTDNPLIDVDNQASYHGGNFLGQYVGMGMDHLRYYIGLLAKHLDVQIALLASPEFSNGLPPSLLGNRERKVNMGLKGLQICGNSIMPLLTFYGNSIADRFPTHAEQFNQNINSQGYTSATLARRSVDIFQNYVAIALMFGVQAVDLRTYKKTGHYDARACLSPATERLYSAVRHVVGQKPTSDRPYIWNDNEQGLDEHIARISADIAAGGVIVQAVQDILPCLH

SEQ ID NO: 35 - protein, 567 aa, synthetic construct
MKTLSQAQSKTSSQQFSFTGNSSANVIIGNQKLTINDVARVARNGTLVSLTNNTDILQGIQASCDYINNAVESGEPIYGVTSGFGGMANVAISREQASELQENVVWYMKTGAGNKLPLADVRAAMLLRANSHMRGASGIRLELIKRMEIFLNAGVTPYVYEFGSIGASGDLVPLSYITGSLIGLDPSFKVDFNGKEMDAPTALRQLNLSPLTLLPKEGIAMTNGTSVMTGIAANCVYDTQILTAIAMGVHALDIQALNGTNQSFHPFIHNSKPHPGQLWAADQMISLLANSQLVRDELDGKHDYRDHELIQDRYSLRCLPQYLGPIVDGISQIAKQIEIEINSVTDNPLIDVDNQASYHGGNFLGQYVGMGMDHLRYYIGLLAKHLDVQIALLASPEFSNGLPPSLLGNRERKVNMGLKGLQICGNSIMPLLTFYGNSIADRFPTHAEQFNQNINSQGYTSATLARRSVDIFQNYVAIALMFGVQAVDLRTYKKTGHYDARACLSPATERLYSAVRHVVGQKPTSDRPYIWNDNEQGLDEHIARISADIAAGGVIVQAVQDILPCLH

SEQ ID NO: 36 - protein, 567 aa, synthetic construct
MKTLSQAQSKTSSQQFSFTGNSSANVIIGNQKLTINDVARVARNGTLVSLTNNTDILQGIQASCDYINNAVESGEPIYGVTSGFGGMANVAISREQASELQSNIVWFLKTGAGNKLPLADVRAAMLLRANSHMRGASGIRLELIKRMEIFLNAGVTPYVYEFGSIGASGDLVPLSYITGSLIGLDPSFKVDFNGKEMDAPTALRQLNLSPLTLLPKESIAMVNGTSVMTGIAANCVYDTQILTAIAMGVHALDIQALNGTNQSFHPFIHNSKPHPGQLWAADQMISLLANSQLVRDELDGKHDYRDHELIQDRYSLRCLPQYLGPIVDGISQIAKQIEIEINSVTDNPLIDVDNQASYHGGNFLGQYVGMGMDHLRYYIGLLAKHLDVQIALLASPEFSNGLPPSLLGNRERKVNMGLKGLQICGNSIMPLLTFYGNSIADRFPTHAEQFNQNINSQGYTSATLARRSVDIFQNYVAIALMFGVQAVDLRTYKKTGHYDARACLSPATERLYSAVRHVVGQKPTSDRPYIWNDNEQGLDEHIARISADIAAGGVIVQAVQDILPCLH

SEQ ID NO: 37 - protein, 567 aa, synthetic construct
MKTLSQAQSKTSSQQFSFTGNSSANVIIGNQKLTINDVARVARNGTLVSLTNNTDILQGIQASCDYINNAVESGEPIYGVTSGFGGMANVAISREQASELQTNVVWFLKTGAGNKLPLADVRAAMLLRANSHMRGASGIRLELIKRMEIFLNAGVTPYVYEFGSIGASGDLVPLSYITGSLIGLDPSFKVDFNGKEMDAPTALRQLNLSPLTLLPKEALAMLNGTSVMTGIAANCVYDTQILTAIAMGVHALDIQALNGTNQSFHPFIHNSKPHPGQLWAADQMISLLANSQLVRDELDGKHDYRDHELIQDRYSLRCLPQYLGPIVDGISQIAKQIEIEINSVTDNPLIDVDNQASYHGGNFLGQYVGMGMDHLRYYIGLLAKHLDVQIALLASPEFSNGLPPSLLGNRERKVNMGLKGLQICGNSIMPLLTFYGNSIADRFPTHAEQFNQNINSQGYTSATLARRSVDIFQNYVAIALMFGVQAVDLRTYKKTGHYDARACLSPATERLYSAVRHVVGQKPTSDRPYIWNDNEQGLDEHIARISADIAAGGVIVQAVQDILPCLH

SEQ ID NO: 38 - protein, 567 aa, synthetic construct
MKTLSQAQSKTSSQQFSFTGNSSANVIIGNQKLTINDVARVARNGTLVSLTNNTDILQGIQASCDYINNAVESGEPIYGVTSGFGGMANVAISREQASELQKNLVWFHKTGAGNKLPLADVRAAMLLRANSHMRGASGIRLELIKRMEIFLNAGVTPYVYEFGSIGASGDLVPLSYITGSLIGLDPSFKVDFNGKEMDAPTALRQLNLSPLTLLPKEAIAMTNGTSVMTGIAANCVYDTQILTAIAMGVHALDIQALNGTNQSFHPFIHNSKPHPGQLWAADQMISLLANSQLVRDELDGKHDYRDHELIQDRYSLRCLPQYLGPIVDGISQIAKQIEIEINSVTDNPLIDVDNQASYHGGNFLGQYVGMGMDHLRYYIGLLAKHLDVQIALLASPEFSNGLPPSLLGNRERKVNMGLKGLQICGNSIMPLLTFYGNSIADRFPTHAEQFNQNINSQGYTSATLARRSVDIFQNYVAIALMFGVQAVDLRTYKKTGHYDARACLSPATERLYSAVRHVVGQKPTSDRPYIWNDNEQGLDEHIARISADIAAGGVIVQAVQDILPCLH

SEQ ID NO: 39 - protein, 567 aa, synthetic construct
MKTLSQAQSKTSSQQFSFTGNSSANVIIGNQKLTINDVARVARNGTLVSLTNNTDILQGIQASCDYINNAVESGEPIYGVTSGFGGMANVAISREQASELQTNIVWFMKTGAGNKLPLADVRAAMLLRANSHMRGASGIRLELIKRMEIFLNAGVTPYVYEFGSIGASGDLVPLSYITGSLIGLDPSFKVDFNGKEMDAPTALRQLNLSPLTLLPKESLAMMNGTSVMTGIAANCVYDTQILTAIAMGVHALDIQALNGTNQSFHPFIHNSKPHPGQLWAADQMISLLANSQLVRDELDGKHDYRDHELIQDRYSLRCLPQYLGPIVDGISQIAKQIEIEINSVTDNPLIDVDNQASYHGGNFLGQYVGMGMDHLRYYIGLLAKHLDVQIALLASPEFSNGLPPSLLGNRERKVNMGLKGLQICGNSIMPLLTFYGNSIADRFPTHAEQFNQNINSQGYTSATLARRSVDIFQNYVAIALMFGVQAVDLRTYKKTGHYDARACLSPATERLYSAVRHVVGQKPTSDRPYIWNDNEQGLDEHIARISADIAAGGVIVQAVQDILPCLH

SEQ ID NO: 40 - protein, 567 aa, synthetic construct
MKTLSQAQSKTSSQQFSFTGNSSANVIIGNQKLTINDVARVARNGTLVSLTNNTDILQGIQASCDYINNAVESGEPIYGVTSGFGGMANVAISREQASELQHNLVWYMKTGAGNKLPLADVRAAMLLRANSHMRGASGIRLELIKRMEIFLNAGVTPYVYEFGSIGASGDLVPLSYITGSLIGLDPSFKVDFNGKEMDAPTALRQLNLSPLTLLPKEGIAMVNGTSVMTGIAANCVYDTQILTAIAMGVHALDIQALNGTNQSFHPFIHNSKPHPGQLWAADQMISLLANSQLVRDELDGKHDYRDHELIQDRYSLRCLPQYLGPIVDGISQIAKQIEIEINSVTDNPLIDVDNQASYHGGNFLGQYVGMGMDHLRYYIGLLAKHLDVQIALLASPEFSNGLPPSLLGNRERKVNMGLKGLQICGNSIMPLLTFYGNSIADRFPTHAEQFNQNINSQGYTSATLARRSVDIFQNYVAIALMFGVQAVDLRTYKKTGHYDARACLSPATERLYSAVRHVVGQKPTSDRPYIWNDNEQGLDEHIARISADIAAGGVIVQAVQDILPCLH

SEQ ID NO: 41 - protein, 567 aa, synthetic construct
MKTLSQAQSKTSSQQFSFTGNSSANVIIGNQKLTINDVARVARNGTLVSLTNNTDILQGIQASCDYINNAVESGEPIYGVTSGFGGMANVAISREQASELQTNVVWHQKTGAGNKLPLADVRAAMLLRANSHMRGASGIRLELIKRMEIFLNAGVTPYVYEFGSIGASGDLVPLSYITGSLIGLDPSFKVDFNGKEMDAPTALRQLNLSPLTLLPKEGLAMLNGTSVMTGIAANCVYDTQILTAIAMGVHALDIQALNGTNQSFHPFIHNSKPHPGQLWAADQMISLLANSQLVRDELDGKHDYRDHELIQDRYSLRCLPQYLGPIVDGISQIAKQIEIEINSVTDNPLIDVDNQASYHGGNFLGQYVGMGMDHLRYYIGLLAKHLDVQIALLASPEFSNGLPPSLLGNRERKVNMGLKGLQICGNSIMPLLTFYGNSIADRFPTHAEQFNQNINSQGYTSATLARRSVDIFQNYVAIALMFGVQAVDLRTYKKTGHYDARACLSPATERLYSAVRHVVGQKPTSDRPYIWNDNEQGLDEHIARISADIAAGGVIVQAVQDILPCLH

SEQ ID NO: 42 - protein, 567 aa, synthetic construct
MKTLSQAQSKTSSQQFSFTGNSSANVIIGNQKLTINDVARVARNGTLVSLTNNTDILQGIQASCDYINNAVESGEPIYGVTSGFGGMANVAISREQASELQKNAVWFQKTGAGNKLPLADVRAAMLLRANSHMRGASGIRLELIKRMEIFLNAGVTPYVYEFGSIGASGDLVPLSYITGSLIGLDPSFKVDFNGKEMDAPTALRQLNLSPLTLLPKEAIAMMNGTSVMTGIAANCVYDTQILTAIAMGVHALDIQALNGTNQSFHPFIHNSKPHPGQLWAADQMISLLANSQLVRDELDGKHDYRDHELIQDRYSLRCLPQYLGPIVDGISQIAKQIEIEINSVTDNPLIDVDNQASYHGGNFLGQYVGMGMDHLRYYIGLLAKHLDVQIALLASPEFSNGLPPSLLGNRERKVNMGLKGLQICGNSIMPLLTFYGNSIADRFPTHAEQFNQNINSQGYTSATLARRSVDIFQNYVAIALMFGVQAVDLRTYKKTGHYDARACLSPATERLYSAVRHVVGQKPTSDRPYIWNDNEQGLDEHIARISADIAAGGVIVQAVQDILPCLH

SEQ ID NO: 43 - protein, 567 aa, synthetic construct
MKTLSQAQSKTSSQQFSFTGNSSANVIIGNQKLTINDVARVARNGTLVSLTNNTDILQGIQASCDYINNAVESGEPIYGVTSGFGGMANVAISREQASELQSNAVWSLKTGAGNKLPLADVRAAMLLRANSHMRGASGIRLELIKRMEIFLNAGVTPYVYEFGSIGASGDLVPLSYITGSLIGLDPSFKVDFNGKEMDAPTALRQLNLSPLTLLPKEGIAMNNGTSVMTGIAANCVYDTQILTAIAMGVHALDIQALNGTNQSFHPFIHNSKPHPGQLWAADQMISLLANSQLVRDELDGKHDYRDHELIQDRYSLRCLPQYLGPIVDGISQIAKQIEIEINSVTDNPLIDVDNQASYHGGNFLGQYVGMGMDHLRYYIGLLAKHLDVQIALLASPEFSNGLPPSLLGNRERKVNMGLKGLQICGNSIMPLLTFYGNSIADRFPTHAEQFNQNINSQGYTSATLARRSVDIFQNYVAIALMFGVQAVDLRTYKKTGHYDARACLSPATERLYSAVRHVVGQKPTSDRPYIWNDNEQGLDEHIARISADIAAGGVIVQAVQDILPCLH

SEQ ID NO: 44 - protein, 567 aa, synthetic construct
MKTLSQAQSKTSSQQFSFTGNSSANVIIGNQKLTINDVARVARNGTLVSLTNNTDILQGIQASCDYINNAVESGEPIYGVTSGFGGMANVAISREQASELQSNLVWFHKTGAGNKLPLADVRAAMLLRANSHMRGASGIRLELIKRMEIFLNAGVTPYVYEFGSIGASGDLVPLSYITGSLIGLDPSFKVDFNGKEMDAPTALRQLNLSPLTLLPKESLAMVNGTSVMTGIAANCVYDTQILTAIAMGVHALDIQALNGTNQSFHPFIHNSKPHPGQLWAADQMISLLANSQLVRDELDGKHDYRDHELIQDRYSLRCLPQYLGPIVDGISQIAKQIEIEINSVTDNPLIDVDNQASYHGGNFLGQYVGMGMDHLRYYIGLLAKHLDVQIALLASPEFSNGLPPSLLGNRERKVNMGLKGLQICGNSIMPLLTFYGNSIADRFPTHAEQFNQNINSQGYTSATLARRSVDIFQNYVAIALMFGVQAVDLRTYKKTGHYDARACLSPATERLYSAVRHVVGQKPTSDRPYIWNDNEQGLDEHIARISADIAAGGVIVQAVQDILPCLH

SEQ ID NO: 45 - protein, 567 aa, synthetic construct
MKTLSQAQSKTSSQQFSFTGNSSANVIIGNQKLTINDVARVARNGTLVSLTNNTDILQGIQASCDYINNAVESGEPIYGVTSGFGGMANVAISREQASELQKNAVWFHKTGAGNKLPLADVRAAMLLRANSHMRGASGIRLELIKRMEIFLNAGVTPYVYEFGSIGASGDLVPLSYITGSLIGLDPSFKVDFNGKEMDAPTALRQLNLSPLTLLPKEGIAMNNGTSVMTGIAANCVYDTQILTAIAMGVHALDIQALNGTNQSFHPFIHNSKPHPGQLWAADQMISLLANSQLVRDELDGKHDYRDHELIQDRYSLRCLPQYLGPIVDGISQIAKQIEIEINSVTDNPLIDVDNQASYHGGNFLGQYVGMGMDHLRYYIGLLAKHLDVQIALLASPEFSNGLPPSLLGNRERKVNMGLKGLQICGNSIMPLLTFYGNSIADRFPTHAEQFNQNINSQGYTSATLARRSVDIFQNYVAIALMFGVQAVDLRTYKKTGHYDARACLSPATERLYSAVRHVVGQKPTSDRPYIWNDNEQGLDEHIARISADIAAGGVIVQAVQDILPCLH

SEQ ID NO: 46 - protein, 567 aa, synthetic construct
MKTLSQAQSKTSSQQFSFTGNSSANVIIGNQKLTINDVARVARNGTLVSLTNNTDILQGIQASCDYINNAVESGEPIYGVTSGFGGMANVAISREQASELQSNLVWFHKTGAGNKLPLADVRAAMLLRANSHMRGASGIRLELIKRMEIFLNAGVTPYVYEFGSIGASGDLVPLSYITGSLIGLDPSFKVDFNGKEMDAPTALRQLNLSPLTLLPKEGLAMNNGTSVMTGIAANCVYDTQILTAIAMGVHALDIQALNGTNQSFHPFIHNSKPHPGQLWAADQMISLLANSQLVRDELDGKHDYRDHELIQDRYSLRCLPQYLGPIVDGISQIAKQIEIEINSVTDNPLIDVDNQASYHGGNFLGQYVGMGMDHLRYYIGLLAKHLDVQIALLASPEFSNGLPPSLLGNRERKVNMGLKGLQICGNSIMPLLTFYGNSIADRFPTHAEQFNQNINSQGYTSATLARRSVDIFQNYVAIALMFGVQAVDLRTYKKTGHYDARACLSPATERLYSAVRHVVGQKPTSDRPYIWNDNEQGLDEHIARISADIAAGGVIVQAVQDILPCLH

SEQ ID NO: 47 - protein, 567 aa, synthetic construct
MKTLSQAQSKTSSQQFSFTGNSSANVIIGNQKLTINDVARVARNGTLVSLTNNTDILQGIQASCDYINNAVESGEPIYGVTSGFGGMANVAISREQASELQHNMVWFMKTGAGNKLPLADVRAAMLLRANSHMRGASGIRLELIKRMEIFLNAGVTPYVYEFGSIGASGDLVPLSYITGSLIGLDPSFKVDFNGKEMDAPTALRQLNLSPLTLLPKEGIAMMNGTSVMTGIAANCVYDTQILTAIAMGVHALDIQALNGTNQSFHPFIHNSKPHPGQLWAADQMISLLANSQLVRDELDGKHDYRDHELIQDRYSLRCLPQYLGPIVDGISQIAKQIEIEINSVTDNPLIDVDNQASYHGGNFLGQYVGMGMDHLRYYIGLLAKHLDVQIALLASPEFSNGLPPSLLGNRERKVNMGLKGLQICGNSIMPLLTFYGNSIADRFPTHAEQFNQNINSQGYTSATLARRSVDIFQNYVAIALMFGVQAVDLRTYKKTGHYDARACLSPATERLYSAVRHVVGQKPTSDRPYIWNDNEQGLDEHIARISADIAAGGVIVQAVQDILPCLH

SEQ ID NO: 48 - protein, 567 aa, synthetic construct
MKTLSQAQSKTSSQQFSFTGNSSANVIIGNQKLTINDVARVARNGTLVSLTNNTDILQGIQASCDYINNAVESGEPIYGVTSGFGGMANVAISREQASELQKNAVWYVKTGAGNKLPLADVRAAMLLRANSHMRGASGIRLELIKRMEIFLNAGVTPYVYEFGSIGASGDLVPLSYITGSLIGLDPSFKVDFNGKEMDAPTALRQLNLSPLTLLPKEAIAMNNGTSVMTGIAANCVYDTQILTAIAMGVHALDIQALNGTNQSFHPFIHNSKPHPGQLWAADQMISLLANSQLVRDELDGKHDYRDHELIQDRYSLRCLPQYLGPIVDGISQIAKQIEIEINSVTDNPLIDVDNQASYHGGNFLGQYVGMGMDHLRYYIGLLAKHLDVQIALLASPEFSNGLPPSLLGNRERKVNMGLKGLQICGNSIMPLLTFYGNSIADRFPTHAEQFNQNINSQGYTSATLARRSVDIFQNYVAIALMFGVQAVDLRTYKKTGHYDARACLSPATERLYSAVRHVVGQKPTSDRPYIWNDNEQGLDEHIARISADIAAGGVIVQAVQDILPCLH

SEQ ID NO: 49 - protein, 567 aa, synthetic construct
MKTLSQAQSKTSSQQFSFTGNSSANVIIGNQKLTINDVARVARNGTLVSLTNNTDILQGIQASCDYINNAVESGEPIYGVTSGFGGMANVAISREQASELQHNLVWFMKTGAGNKLPLADVRAAMLLRANSHMRGASGIRLELIKRMEIFLNAGVTPYVYEFGSIGASGDLVPLSYITGSLIGLDPSFKVDFNGKEMDAPTALRQLNLSPLTLLPKESLAMLNGTSVMTGIAANCVYDTQILTAIAMGVHALDIQALNGTNQSFHPFIHNSKPHPGQLWAADQMISLLANSQLVRDELDGKHDYRDHELIQDRYSLRCLPQYLGPIVDGISQIAKQIEIEINSVTDNPLIDVDNQASYHGGNFLGQYVGMGMDHLRYYIGLLAKHLDVQIALLASPEFSNGLPPSLLGNRERKVNMGLKGLQICGNSIMPLLTFYGNSIADRFPTHAEQFNQNINSQGYTSATLARRSVDIFQNYVAIALMFGVQAVDLRTYKKTGHYDARACLSPATERLYSAVRHVVGQKPTSDRPYIWNDNEQGLDEHIARISADIAAGGVIVQAVQDILPCLH

SEQ ID NO: 50 - protein, 567 aa, synthetic construct
MKTLSQAQSKTSSQQFSFTGNSSANVIIGNQKLTINDVARVARNGTLVSLTNNTDILQGIQASCDYINNAVESGEPIYGVTSGFGGMANVAISREQASELQENMVWYMKTGAGNKLPLADVRAAMLLRANSHMRGASGIRLELIKRMEIFLNAGVTPYVYEFGSIGASGDLVPLSYITGSLIGLDPSFKVDFNGKEMDAPTALRQLNLSPLTLLPKEAIAMMNGTSVMTGIAANCVYDTQILTAIAMGVHALDIQALNGTNQSFHPFIHNSKPHPGQLWAADQMISLLANSQLVRDELDGKHDYRDHELIQDRYSLRCLPQYLGPIVDGISQIAKQIEIEINSVTDNPLIDVDNQASYHGGNFLGQYVGMGMDHLRYYIGLLAKHLDVQIALLASPEFSNGLPPSLLGNRERKVNMGLKGLQICGNSIMPLLTFYGNSIADRFPTHAEQFNQNINSQGYTSATLARRSVDIFQNYVAIALMFGVQAVDLRTYKKTGHYDARACLSPATERLYSAVRHVVGQKPTSDRPYIWNDNEQGLDEHIARISADIAAGGVIVQAVQDILPCLH

SEQ ID NO: 51 - protein, 567 aa, synthetic construct
MKTLSQAQSKTSSQQFSFTGNSSANVIIGNQKLTINDVARVARNGTLVSLTNNTDILQGIQASCDYINNAVESGEPIYGVTSGFGGMANVAISREQASELQENVVWHLKTGAGNKLPLADVRAAMLLRANSHMRGASGIRLELIKRMEIFLNAGVTPYVYEFGSIGASGDLVPLSYITGSLIGLDPSFKVDFNGKEMDAPTALRQLNLSPLTLLPKEGLAMNNGTSVMTGIAANCVYDTQILTAIAMGVHALDIQALNGTNQSFHPFIHNSKPHPGQLWAADQMISLLANSQLVRDELDGKHDYRDHELIQDRYSLRCLPQYLGPIVDGISQIAKQIEIEINSVTDNPLIDVDNQASYHGGNFLGQYVGMGMDHLRYYIGLLAKHLDVQIALLASPEFSNGLPPSLLGNRERKVNMGLKGLQICGNSIMPLLTFYGNSIADRFPTHAEQFNQNINSQGYTSATLARRSVDIFQNYVAIALMFGVQAVDLRTYKKTGHYDARACLSPATERLYSAVRHVVGQKPTSDRPYIWNDNEQGLDEHIARISADIAAGGVIVQAVQDILPCLH

SEQ ID NO: 52 - protein, 567 aa, synthetic construct
MKTLSQAQSKTSSQQFSFTGNSSANVIIGNQKLTINDVARVARNGTLVSLTNNTDILQGIQASCDYINNAVESGEPIYGVTSGFGGMANVAISREQASELQHNLVWHMKTGAGNKLPLADVRAAMLLRANSHMRGASGIRLELIKRMEIFLNAGVTPYVYEFGSIGASGDLVPLSYITGSLIGLDPSFKVDFNGKEMDAPTALRQLNLSPLTLLPKEGIAMTNGTSVMTGIAANCVYDTQILTAIAMGVHALDIQALNGTNQSFHPFIHNSKPHPGQLWAADQMISLLANSQLVRDELDGKHDYRDHELIQDRYSLRCLPQYLGPIVDGISQIAKQIEIEINSVTDNPLIDVDNQASYHGGNFLGQYVGMGMDHLRYYIGLLAKHLDVQIALLASPEFSNGLPPSLLGNRERKVNMGLKGLQICGNSIMPLLTFYGNSIADRFPTHAEQFNQNINSQGYTSATLARRSVDIFQNYVAIALMFGVQAVDLRTYKKTGHYDARACLSPATERLYSAVRHVVGQKPTSDRPYIWNDNEQGLDEHIARISADIAAGGVIVQAVQDILPCLH

SEQ ID NO: 53 - protein, 567 aa, synthetic construct
MKTLSQAQSKTSSQQFSFTGNSSANVIIGNQKLTINDVARVARNGTLVSLTNNTDILQGIQASCDYINNAVESGEPIYGVTSGFGGMANVAISREQASELQHNVVWSQKTGAGNKLPLADVRAAMLLRANSHMRGASGIRLELIKRMEIFLNAGVTPYVYEFGSIGASGDLVPLSYITGSLIGLDPSFKVDFNGKEMDAPTALRQLNLSPLTLLPKESLAMTNGTSVMTGIAANCVYDTQILTAIAMGVHALDIQALNGTNQSFHPFIHNSKPHPGQLWAADQMISLLANSQLVRDELDGKHDYRDHELIQDRYSLRCLPQYLGPIVDGISQIAKQIEIEINSVTDNPLIDVDNQASYHGGNFLGQYVGMGMDHLRYYIGLLAKHLDVQIALLASPEFSNGLPPSLLGNRERKVNMGLKGLQICGNSIMPLLTFYGNSIADRFPTHAEQFNQNINSQGYTSATLARRSVDIFQNYVAIALMFGVQAVDLRTYKKTGHYDARACLSPATERLYSAVRHVVGQKPTSDRPYIWNDNEQGLDEHIARISADIAAGGVIVQAVQDILPCLH

SEQ ID NO: 54 - protein, 567 aa, synthetic construct
MKTLSQAQSKTSSQQFSFTGNSSANVIIGNQKLTINDVARVARNGTLVSLTNNTDILQGIQASCDYINNAVESGEPIYGVTSGFGGMANVAISREQASELQENMVWSMKTGAGNKLPLADVRAAMLLRANSHMRGASGIRLELIKRMEIFLNAGVTPYVYEFGSIGASGDLVPLSYITGSLIGLDPSFKVDFNGKEMDAPTALRQLNLSPLTLLPKEAIAMMNGTSVMTGIAANCVYDTQILTAIAMGVHALDIQALNGTNQSFHPFIHNSKPHPGQLWAADQMISLLANSQLVRDELDGKHDYRDHELIQDRYSLRCLPQYLGPIVDGISQIAKQIEIEINSVTDNPLIDVDNQASYHGGNFLGQYVGMGMDHLRYYIGLLAKHLDVQIALLASPEFSNGLPPSLLGNRERKVNMGLKGLQICGNSIMPLLTFYGNSIADRFPTHAEQFNQNINSQGYTSATLARRSVDIFQNYVAIALMFGVQAVDLRTYKKTGHYDARACLSPATERLYSAVRHVVGQKPTSDRPYIWNDNEQGLDEHIARISADIAAGGVIVQAVQDILPCLH

SEQ ID NO: 55 - protein, 567 aa, synthetic construct
MKTLSQAQSKTSSQQFSFTGNSSANVIIGNQKLTINDVARVARNGTLVSLTNNTDILQGIQASCDYINNAVESGEPIYGVTSGFGGMANVAISREQASELQENVVWYMKTGAGNKLPLADVRAAMLLRANSHMRGASGIRLELIKRMEIFLNAGVTPYVYEFGSIGASGDLVPLSYITGSLIGLDPSFKVDFNGKEMDAPTALRQLNLSPLTLLPKEGIAMMNGTSVMTGIAANCVYDTQILTAIAMGVHALDIQALNGTNQSFHPFIHNSKPHPGQLWAADQMISLLANSQLVRDELDGKHDYRDHELIQDRYSLRCLPQYLGPIVDGISQIAKQIEIEINSVTDNPLIDVDNQASYHGGNFLGQYVGMGMDHLRYYIGLLAKHLDVQIALLASPEFSNGLPPSLLGNRERKVNMGLKGLQICGNSIMPLLTFYGNSIADRFPTHAEQFNQNINSQGYTSATLARRSVDIFQNYVAIALMFGVQAVDLRTYKKTGHYDARACLSPATERLYSAVRHVVGQKPTSDRPYIWNDNEQGLDEHIARISADIAAGGVIVQAVQDILPCLH

SEQ ID NO: 56 - protein, 567 aa, synthetic construct
MKTLSQAQSKTSSQQFSFTGNSSANVIIGNQKLTINDVARVARNGTLVSLTNNTDILQGIQASCDYINNAVESGEPIYGVTSGFGGMANVAISREQASELQKNLVWYVKTGAGNKLPLADVRAAMLLRANSHMRGASGIRLELIKRMEIFLNAGVTPYVYEFGSIGASGDLVPLSYITGSLIGLDPSFKVDFNGKEMDAPTALRQLNLSPLTLLPKEGIAMVNGTSVMTGIAANCVYDTQILTAIAMGVHALDIQALNGTNQSFHPFIHNSKPHPGQLWAADQMISLLANSQLVRDELDGKHDYRDHELIQDRYSLRCLPQYLGPIVDGISQIAKQIEIEINSVTDNPLIDVDNQASYHGGNFLGQYVGMGMDHLRYYIGLLAKHLDVQIALLASPEFSNGLPPSLLGNRERKVNMGLKGLQICGNSIMPLLTFYGNSIADRFPTHAEQFNQNINSQGYTSATLARRSVDIFQNYVAIALMFGVQAVDLRTYKKTGHYDARACLSPATERLYSAVRHVVGQKPTSDRPYIWNDNEQGLDEHIARISADIAAGGVIVQAVQDILPCLH

SEQ ID NO: 57 - protein, 567 aa, synthetic construct
MKTLSQAQSKTSSQQFSFTGNSSANVIIGNQKLTINDVARVARNGTLVSLTNNTDILQGIQASCDYINNAVESGEPIYGVTSGFGGMANVAISREQASELQENMVWHLKTGAGNKLPLADVRAAMLLRANSHMRGASGIRLELIKRMEIFLNAGVTPYVYEFGSIGASGDLVPLSYITGSLIGLDPSFKVDFNGKEMDAPTALRQLNLSPLTLLPKEAIAMLNGTSVMTGIAANCVYDTQILTAIAMGVHALDIQALNGTNQSFHPFIHNSKPHPGQLWAADQMISLLANSQLVRDELDGKHDYRDHELIQDRYSLRCLPQYLGPIVDGISQIAKQIEIEINSVTDNPLIDVDNQASYHGGNFLGQYVGMGMDHLRYYIGLLAKHLDVQIALLASPEFSNGLPPSLLGNRERKVNMGLKGLQICGNSIMPLLTFYGNSIADRFPTHAEQFNQNINSQGYTSATLARRSVDIFQNYVAIALMFGVQAVDLRTYKKTGHYDARACLSPATERLYSAVRHVVGQKPTSDRPYIWNDNEQGLDEHIARISADIAAGGVIVQAVQDILPCLH

SEQ ID NO: 58 - protein, 567 aa, synthetic construct
MKTLSQAQSKTSSQQFSFTGNSSANVIIGNQKLTINDVARVARNGTLVSLTNNTDILQGIQASCDYINNAVESGEPIYGVTSGFGGMANVAISREQASELQHNMVWYLKTGAGNKLPLADVRAAMLLRANSHMRGASGIRLELIKRMEIFLNAGVTPYVYEFGSIGASGDLVPLSYITGSLIGLDPSFKVDFNGKEMDAPTALRQLNLSPLTLLPKEALAMINGTSVMTGIAANCVYDTQILTAIAMGVHALDIQALNGTNQSFHPFIHNSKPHPGQLWAADQMISLLANSQLVRDELDGKHDYRDHELIQDRYSLRCLPQYLGPIVDGISQIAKQIEIEINSVTDNPLIDVDNQASYHGGNFLGQYVGMGMDHLRYYIGLLAKHLDVQIALLASPEFSNGLPPSLLGNRERKVNMGLKGLQICGNSIMPLLTFYGNSIADRFPTHAEQFNQNINSQGYTSATLARRSVDIFQNYVAIALMFGVQAVDLRTYKKTGHYDARACLSPATERLYSAVRHVVGQKPTSDRPYIWNDNEQGLDEHIARISADIAAGGVIVQAVQDILPCLH

SEQ ID NO: 59 - protein, 567 aa, synthetic construct
MKTLSQAQSKTSSQQFSFTGNSSANVIIGNQKLTINDVARVARNGTLVSLTNNTDILQGIQASCDYINNAVESGEPIYGVTSGFGGMANVAISREQASELQTNLVWYLKTGAGNKLPLADVRAAMLLRANSHMRGASGIRLELIKRMEIFLNAGVTPYVYEFGSIGASGDLVPLSYITGSLIGLDPSFKVDFNGKEMDAPTALRQLNLSPLTLLPKEGIAMNNGTSVMTGIAANCVYDTQILTAIAMGVHALDIQALNGTNQSFHPFIHNSKPHPGQLWAADQMISLLANSQLVRDELDGKHDYRDHELIQDRYSLRCLPQYLGPIVDGISQIAKQIEIEINSVTDNPLIDVDNQASYHGGNFLGQYVGMGMDHLRYYIGLLAKHLDVQIALLASPEFSNGLPPSLLGNRERKVNMGLKGLQICGNSIMPLLTFYGNSIADRFPTHAEQFNQNINSQGYTSATLARRSVDIFQNYVAIALMFGVQAVDLRTYKKTGHYDARACLSPATERLYSAVRHVVGQKPTSDRPYIWNDNEQGLDEHIARISADIAAGGVIVQAVQDILPCLH

SEQ ID NO: 60 - protein, 567 aa, synthetic construct
MKTLSQAQSKTSSQQFSFTGNSSANVIIGNQKLTINDVARVARNGTLVSLTNNTDILQGIQASCDYINNAVESGEPIYGVTSGFGGMANVAISREQASELQSNAVWYMKTGAGNKLPLADVRAAMLLRANSHMRGASGIRLELIKRMEIFLNAGVTPYVYEFGSIGASGDLVPLSYITGSLIGLDPSFKVDFNGKEMDAPTALRQLNLSPLTLLPKEGLAMMNGTSVMTGIAANCVYDTQILTAIAMGVHALDIQALNGTNQSFHPFIHNSKPHPGQLWAADQMISLLANSQLVRDELDGKHDYRDHELIQDRYSLRCLPQYLGPIVDGISQIAKQIEIEINSVTDNPLIDVDNQASYHGGNFLGQYVGMGMDHLRYYIGLLAKHLDVQIALLASPEFSNGLPPSLLGNRERKVNMGLKGLQICGNSIMPLLTFYGNSIADRFPTHAEQFNQNINSQGYTSATLARRSVDIFQNYVAIALMFGVQAVDLRTYKKTGHYDARACLSPATERLYSAVRHVVGQKPTSDRPYIWNDNEQGLDEHIARISADIAAGGVIVQAVQDILPCLH

SEQ ID NO: 61 - protein, 567 aa, synthetic construct
MKTLSQAQSKTSSQQFSFTGNSSANVIIGNQKLTINDVARVARNGTLVSLTNNTDILQGIQASCDYINNAVESGEPIYGVTSGFGGMANVAISREQASELQENLVWYMKTGAGNKLPLADVRAAMLLRANSHMRGASGIRLELIKRMEIFLNAGVTPYVYEFGSIGASGDLVPLSYITGSLIGLDPSFKVDFNGKEMDAPTALRQLNLSPLTLLPKEAIAMVNGTSVMTGIAANCVYDTQILTAIAMGVHALDIQALNGTNQSFHPFIHNSKPHPGQLWAADQMISLLANSQLVRDELDGKHDYRDHELIQDRYSLRCLPQYLGPIVDGISQIAKQIEIEINSVTDNPLIDVDNQASYHGGNFLGQYVGMGMDHLRYYIGLLAKHLDVQIALLASPEFSNGLPPSLLGNRERKVNMGLKGLQICGNSIMPLLTFYGNSIADRFPTHAEQFNQNINSQGYTSATLARRSVDIFQNYVAIALMFGVQAVDLRTYKKTGHYDARACLSPATERLYSAVRHVVGQKPTSDRPYIWNDNEQGLDEHIARISADIAAGGVIVQAVQDILPCLH

SEQ ID NO: 62 - protein, 567 aa, synthetic construct
MKTLSQAQSKTSSQQFSFTGNSSANVIIGNQKLTINDVARVARNGTLVSLTNNTDILQGIQASCDYINNAVESGEPIYGVTSGFGGMANVAISREQASELQKNMVWYVKTGAGNKLPLADVRAAMLLRANSHMRGASGIRLELIKRMEIFLNAGVTPYVYEFGSIGASGDLVPLSYITGSLIGLDPSFKVDFNGKEMDAPTALRQLNLSPLTLLPKESLAMNNGTSVMTGIAANCVYDTQILTAIAMGVHALDIQALNGTNQSFHPFIHNSKPHPGQLWAADQMISLLANSQLVRDELDGKHDYRDHELIQDRYSLRCLPQYLGPIVDGISQIAKQIEIEINSVTDNPLIDVDNQASYHGGNFLGQYVGMGMDHLRYYIGLLAKHLDVQIALLASPEFSNGLPPSLLGNRERKVNMGLKGLQICGNSIMPLLTFYGNSIADRFPTHAEQFNQNINSQGYTSATLARRSVDIFQNYVAIALMFGVQAVDLRTYKKTGHYDARACLSPATERLYSAVRHVVGQKPTSDRPYIWNDNEQGLDEHIARISADIAAGGVIVQAVQDILPCLH

SEQ ID NO: 63 - protein, 567 aa, synthetic construct
MKTLSQAQSKTSSQQFSFTGNSSANVIIGNQKLTINDVARVARNGTLVSLTNNTDILQGIQASCDYINNAVESGEPIYGVTSGFGGMANVAISREQASELQTNIVWHMKTGAGNKLPLADVRAAMLLRANSHMRGASGIRLELIKRMEIFLNAGVTPYVYEFGSIGASGDLVPLSYITGSLIGLDPSFKVDFNGKEMDAPTALRQLNLSPLTLLPKEGIAMVNGTSVMTGIAANCVYDTQILTAIAMGVHALDIQALNGTNQSFHPFIHNSKPHPGQLWAADQMISLLANSQLVRDELDGKHDYRDHELIQDRYSLRCLPQYLGPIVDGISQIAKQIEIEINSVTDNPLIDVDNQASYHGGNFLGQYVGMGMDHLRYYIGLLAKHLDVQIALLASPEFSNGLPPSLLGNRERKVNMGLKGLQICGNSIMPLLTFYGNSIADRFPTHAEQFNQNINSQGYTSATLARRSVDIFQNYVAIALMFGVQAVDLRTYKKTGHYDARACLSPATERLYSAVRHVVGQKPTSDRPYIWNDNEQGLDEHIARISADIAAGGVIVQAVQDILPCLH

SEQ ID NO: 64 - protein, 567 aa, synthetic construct
MKTLSQAQSKTSSQQFSFTGNSSANVIIGNQKLTINDVARVARNGTLVSLTNNTDILQGIQASCDYINNAVESGEPIYGVTSGFGGMANVAISREQASELQKNLVWYVKTGAGNKLPLADVRAAMLLRANSHMRGASGIRLELIKRMEIFLNAGVTPYVYEFGSIGASGDLVPLSYITGSLIGLDPSFKVDFNGKEMDAPTALRQLNLSPLTLLPKEGLAMLNGTSVMTGIAANCVYDTQILTAIAMGVHALDIQALNGTNQSFHPFIHNSKPHPGQLWAADQMISLLANSQLVRDELDGKHDYRDHELIQDRYSLRCLPQYLGPIVDGISQIAKQIEIEINSVTDNPLIDVDNQASYHGGNFLGQYVGMGMDHLRYYIGLLAKHLDVQIALLASPEFSNGLPPSLLGNRERKVNMGLKGLQICGNSIMPLLTFYGNSIADRFPTHAEQFNQNINSQGYTSATLARRSVDIFQNYVAIALMFGVQAVDLRTYKKTGHYDARACLSPATERLYSAVRHVVGQKPTSDRPYIWNDNEQGLDEHIARISADIAAGGVIVQAVQDILPCLH

SEQ ID NO: 65 - protein, 567 aa, synthetic construct
MKTLSQAQSKTSSQQFSFTGNSSANVIIGNQKLTINDVARVARNGTLVSLTNNTDILQGIQASCDYINNAVESGEPIYGVTSGFGGMANVAISREQASELQENIVWSTKTGAGNKLPLADVRAAMLLRANSHMRGASGIRLELIKRMEIFLNAGVTPYVYEFGSIGASGDLVPLSYITGSLIGLDPSFKVDFNGKEMDAPTALRQLNLSPLTLLPKEGIAMINGTSVMTGIAANCVYDTQILTAIAMGVHALDIQALNGTNQSFHPFIHNSKPHPGQLWAADQMISLLANSQLVRDELDGKHDYRDHELIQDRYSLRCLPQYLGPIVDGISQIAKQIEIEINSVTDNPLIDVDNQASYHGGNFLGQYVGMGMDHLRYYIGLLAKHLDVQIALLASPEFSNGLPPSLLGNRERKVNMGLKGLQICGNSIMPLLTFYGNSIADRFPTHAEQFNQNINSQGYTSATLARRSVDIFQNYVAIALMFGVQAVDLRTYKKTGHYDARACLSPATERLYSAVRHVVGQKPTSDRPYIWNDNEQGLDEHIARISADIAAGGVIVQAVQDILPCLH

SEQ ID NO: 66 - protein, 567 aa, synthetic construct
MKTLSQAQSKTSSQQFSFTGNSSANVIIGNQKLTINDVARVARNGTLVSLTNNTDILQGIQASCDYINNAVESGEPIYGVTSGFGGMANVAISREQASELQTNIVWHLKTGAGNKLPLADVRAAMLLRANSHMRGASGIRLELIKRMEIFLNAGVTPYVYEFGSIGASGDLVPLSYITGSLIGLDPSFKVDFNGKEMDAPTALRQLNLSPLTLLPKEGIAMMNGTSVMTGIAANCVYDTQILTAIAMGVHALDIQALNGTNQSFHPFIHNSKPHPGQLWAADQMISLLANSQLVRDELDGKHDYRDHELIQDRYSLRCLPQYLGPIVDGISQIAKQIEIEINSVTDNPLIDVDNQASYHGGNFLGQYVGMGMDHLRYYIGLLAKHLDVQIALLASPEFSNGLPPSLLGNRERKVNMGLKGLQICGNSIMPLLTFYGNSIADRFPTHAEQFNQNINSQGYTSATLARRSVDIFQNYVAIALMFGVQAVDLRTYKKTGHYDARACLSPATERLYSAVRHVVGQKPTSDRPYIWNDNEQGLDEHIARISADIAAGGVIVQAVQDILPCLH

SEQ ID NO: 67 - protein, 567 aa, synthetic construct
MKTLSQAQSKTSSQQFSFTGNSSANVIIGNQKLTINDVARVARNGTLVSLTNNTDILQGIQASCDYINNAVESGEPIYGVTSGFGGMANVAISREQASELQSNIVWSLKTGAGNKLPLADVRAAMLLRANSHMRGASGIRLELIKRMEIFLNAGVTPYVYEFGSIGASGDLVPLSYITGSLIGLDPSFKVDFNGKEMDAPTALRQLNLSPLTLLPKESIAMVNGTSVMTGIAANCVYDTQILTAIAMGVHALDIQALNGTNQSFHPFIHNSKPHPGQLWAADQMISLLANSQLVRDELDGKHDYRDHELIQDRYSLRCLPQYLGPIVDGISQIAKQIEIEINSVTDNPLIDVDNQASYHGGNFLGQYVGMGMDHLRYYIGLLAKHLDVQIALLASPEFSNGLPPSLLGNRERKVNMGLKGLQICGNSIMPLLTFYGNSIADRFPTHAEQFNQNINSQGYTSATLARRSVDIFQNYVAIALMFGVQAVDLRTYKKTGHYDARACLSPATERLYSAVRHVVGQKPTSDRPYIWNDNEQGLDEHIARISADIAAGGVIVQAVQDILPCLH

SEQ ID NO: 68 - protein, 567 aa, synthetic construct
MKTLSQAQSKTSSQQFSFTGNSSANVIIGNQKLTINDVARVARNGTLVSLTNNTDILQGIQASCDYINNAVESGEPIYGVTSGFGGMANVAISREQASELQHNMVWYTKTGAGNKLPLADVRAAMLLRANSHMRGASGIRLELIKRMEIFLNAGVTPYVYEFGSIGASGDLVPLSYITGSLIGLDPSFKVDFNGKEMDAPTALRQLNLSPLTLLPKESLAMLNGTSVMTGIAANCVYDTQILTAIAMGVHALDIQALNGTNQSFHPFIHNSKPHPGQLWAADQMISLLANSQLVRDELDGKHDYRDHELIQDRYSLRCLPQYLGPIVDGISQIAKQIEIEINSVTDNPLIDVDNQASYHGGNFLGQYVGMGMDHLRYYIGLLAKHLDVQIALLASPEFSNGLPPSLLGNRERKVNMGLKGLQICGNSIMPLLTFYGNSIADRFPTHAEQFNQNINSQGYTSATLARRSVDIFQNYVAIALMFGVQAVDLRTYKKTGHYDARACLSPATERLYSAVRHVVGQKPTSDRPYIWNDNEQGLDEHIARISADIAAGGVIVQAVQDILPCLH

SEQ ID NO: 69 - protein, 567 aa, synthetic construct
MKTLSQAQSKTSSQQFSFTGNSSANVIIGNQKLTINDVARVARNGTLVSLTNNTDILQGIQASCDYINNAVESGEPIYGVTSGFGGMANVAISREQASELQTNMVWYTKTGAGNKLPLADVRAAMLLRANSHMRGASGIRLELIKRMEIFLNAGVTPYVYEFGSIGASGDLVPLSYITGSLIGLDPSFKVDFNGKEMDAPTALRQLNLSPLTLLPKEGLAMLNGTSVMTGIAANCVYDTQILTAIAMGVHALDIQALNGTNQSFHPFIHNSKPHPGQLWAADQMISLLANSQLVRDELDGKHDYRDHELIQDRYSLRCLPQYLGPIVDGISQIAKQIEIEINSVTDNPLIDVDNQASYHGGNFLGQYVGMGMDHLRYYIGLLAKHLDVQIALLASPEFSNGLPPSLLGNRERKVNMGLKGLQICGNSIMPLLTFYGNSIADRFPTHAEQFNQNINSQGYTSATLARRSVDIFQNYVAIALMFGVQAVDLRTYKKTGHYDARACLSPATERLYSAVRHVVGQKPTSDRPYIWNDNEQGLDEHIARISADIAAGGVIVQAVQDILPCLH

SEQ ID NO: 70 - protein, 567 aa, synthetic construct
MKTLSQAQSKTSSQQFSFTGNSSANVIIGNQKLTINDVARVARNGTLVSLTNNTDILQGIQASCDYINNAVESGEPIYGVTSGFGGMANVAISREQASELQENLVWYMKTGAGNKLPLADVRAAMLLRANSHMRGASGIRLELIKRMEIFLNAGVTPYVYEFGSIGASGDLVPLSYITGSLIGLDPSFKVDFNGKEMDAPTALRQLNLSPLTLLPKEGLAMTNGTSVMTGIAANCVYDTQILTAIAMGVHALDIQALNGTNQSFHPFIHNSKPHPGQLWAADQMISLLANSQLVRDELDGKHDYRDHELIQDRYSLRCLPQYLGPIVDGISQIAKQIEIEINSVTDNPLIDVDNQASYHGGNFLGQYVGMGMDHLRYYIGLLAKHLDVQIALLASPEFSNGLPPSLLGNRERKVNMGLKGLQICGNSIMPLLTFYGNSIADRFPTHAEQFNQNINSQGYTSATLARRSVDIFQNYVAIALMFGVQAVDLRTYKKTGHYDARACLSPATERLYSAVRHVVGQKPTSDRPYIWNDNEQGLDEHIARISADIAAGGVIVQAVQDILPCLH

SEQ ID NO: 71 - protein, 567 aa, synthetic construct
MKTLSQAQSKTSSQQFSFTGNSSANVIIGNQKLTINDVARVARNGTLVSLTNNTDILQGIQASCDYINNAVESGEPIYGVTSGFGGMANVAISREQASELQSNAVWYTKTGAGNKLPLADVRAAMLLRANSHMRGASGIRLELIKRMEIFLNAGVTPYVYEFGSIGASGDLVPLSYITGSLIGLDPSFKVDFNGKEMDAPTALRQLNLSPLTLLPKESIAMMNGTSVMTGIAANCVYDTQILTAIAMGVHALDIQALNGTNQSFHPFIHNSKPHPGQLWAADQMISLLANSQLVRDELDGKHDYRDHELIQDRYSLRCLPQYLGPIVDGISQIAKQIEIEINSVTDNPLIDVDNQASYHGGNFLGQYVGMGMDHLRYYIGLLAKHLDVQIALLASPEFSNGLPPSLLGNRERKVNMGLKGLQICGNSIMPLLTFYGNSIADRFPTHAEQFNQNINSQGYTSATLARRSVDIFQNYVAIALMFGVQAVDLRTYKKTGHYDARACLSPATERLYSAVRHVVGQKPTSDRPYIWNDNEQGLDEHIARISADIAAGGVIVQAVQDILPCLH

SEQ ID NO: 72 - protein, 567 aa, synthetic construct
MKTLSQAQSKTSSQQFSFTGNSSANVIIGNQKLTINDVARVARNGTLVSLTNNTDILQGIQASCDYINNAVESGEPIYGVTSGFGGMANVAISREQASELQKNIVWHLKTGAGNKLPLADVRAAMLLRANSHMRGASGIRLELIKRMEIFLNAGVTPYVYEFGSIGASGDLVPLSYITGSLIGLDPSFKVDFNGKEMDAPTALRQLNLSPLTLLPKEGIAMINGTSVMTGIAANCVYDTQILTAIAMGVHALDIQALNGTNQSFHPFIHNSKPHPGQLWAADQMISLLANSQLVRDELDGKHDYRDHELIQDRYSLRCLPQYLGPIVDGISQIAKQIEIEINSVTDNPLIDVDNQASYHGGNFLGQYVGMGMDHLRYYIGLLAKHLDVQIALLASPEFSNGLPPSLLGNRERKVNMGLKGLQICGNSIMPLLTFYGNSIADRFPTHAEQFNQNINSQGYTSATLARRSVDIFQNYVAIALMFGVQAVDLRTYKKTGHYDARACLSPATERLYSAVRHVVGQKPTSDRPYIWNDNEQGLDEHIARISADIAAGGVIVQAVQDILPCLH

SEQ ID NO: 73 - protein, 567 aa, synthetic construct
MKTLSQAQSKTSSQQFSFTGNSSANVIIGNQKLTINDVARVARNGTLVSLTNNTDILQGIQASCDYINNAVESGEPIYGVTSGFGGMANVAISREQASELQKNIVWHHKTGAGNKLPLADVRAAMLLRANSHMRGASGIRLELIKRMEIFLNAGVTPYVYEFGSIGASGDLVPLSYITGSLIGLDPSFKVDFNGKEMDAPTALRQLNLSPLTLLPKEGLAMTNGTSVMTGIAANCVYDTQILTAIAMGVHALDIQALNGTNQSFHPFIHNSKPHPGQLWAADQMISLLANSQLVRDELDGKHDYRDHELIQDRYSLRCLPQYLGPIVDGISQIAKQIEIEINSVTDNPLIDVDNQASYHGGNFLGQYVGMGMDHLRYYIGLLAKHLDVQIALLASPEFSNGLPPSLLGNRERKVNMGLKGLQICGNSIMPLLTFYGNSIADRFPTHAEQFNQNINSQGYTSATLARRSVDIFQNYVAIALMFGVQAVDLRTYKKTGHYDARACLSPATERLYSAVRHVVGQKPTSDRPYIWNDNEQGLDEHIARISADIAAGGVIVQAVQDILPCLH

SEQ ID NO: 74 - protein, 567 aa, synthetic construct
MKTLSQAQSKTSSQQFSFTGNSSANVIIGNQKLTINDVARVARNGTLVSLTNNTDILQGIQASCDYINNAVESGEPIYGVTSGFGGMANVAISREQASELQKNIVWHLKTGAGNKLPLADVRAAMLLRANSHMRGASGIRLELIKRMEIFLNAGVTPYVYEFGSIGASGDLVPLSYITGSLIGLDPSFKVDFNGKEMDAPTALRQLNLSPLTLLPKEGIAMLNGTSVMTGIAANCVYDTQILTAIAMGVHALDIQALNGTNQSFHPFIHNSKPHPGQLWAADQMISLLANSQLVRDELDGKHDYRDHELIQDRYSLRCLPQYLGPIVDGISQIAKQIEIEINSVTDNPLIDVDNQASYHGGNFLGQYVGMGMDHLRYYIGLLAKHLDVQIALLASPEFSNGLPPSLLGNRERKVNMGLKGLQICGNSIMPLLTFYGNSIADRFPTHAEQFNQNINSQGYTSATLARRSVDIFQNYVAIALMFGVQAVDLRTYKKTGHYDARACLSPATERLYSAVRHVVGQKPTSDRPYIWNDNEQGLDEHIARISADIAAGGVIVQAVQDILPCLH

SEQ ID NO: 75 - protein, 567 aa, synthetic construct
MKTLSQAQSKTSSQQFSFTGNSSANVIIGNQKLTINDVARVARNGTLVSLTNNTDILQGIQASCDYINNAVESGEPIYGVTSGFGGMANVAISREQASELQHNAVWYTKTGAGNKLPLADVRAAMLLRANSHMRGASGIRLELIKRMEIFLNAGVTPYVYEFGSIGASGDLVPLSYITGSLIGLDPSFKVDFNGKEMDAPTALRQLNLSPLTLLPKEGLAMTNGTSVMTGIAANCVYDTQILTAIAMGVHALDIQALNGTNQSFHPFIHNSKPHPGQLWAADQMISLLANSQLVRDELDGKHDYRDHELIQDRYSLRCLPQYLGPIVDGISQIAKQIEIEINSVTDNPLIDVDNQASYHGGNFLGQYVGMGMDHLRYYIGLLAKHLDVQIALLASPEFSNGLPPSLLGNRERKVNMGLKGLQICGNSIMPLLTFYGNSIADRFPTHAEQFNQNINSQGYTSATLARRSVDIFQNYVAIALMFGVQAVDLRTYKKTGHYDARACLSPATERLYSAVRHVVGQKPTSDRPYIWNDNEQGLDEHIARISADIAAGGVIVQAVQDILPCLH

SEQ ID NO: 76 - protein, 567 aa, synthetic construct
MKTLSQAQSKTSSQQFSFTGNSSANVIIGNQKLTINDVARVARNGTLVSLTNNTDILQGIQASCDYINNAVESGEPIYGVTSGFGGMANVAISREQASELQKNLVWHMKTGAGNKLPLADVRAAMLLRANSHMRGASGIRLELIKRMEIFLNAGVTPYVYEFGSIGASGDLVPLSYITGSLIGLDPSFKVDFNGKEMDAPTALRQLNLSPLTLLPKEGIAMINGTSVMTGIAANCVYDTQILTAIAMGVHALDIQALNGTNQSFHPFIHNSKPHPGQLWAADQMISLLANSQLVRDELDGKHDYRDHELIQDRYSLRCLPQYLGPIVDGISQIAKQIEIEINSVTDNPLIDVDNQASYHGGNFLGQYVGMGMDHLRYYIGLLAKHLDVQIALLASPEFSNGLPPSLLGNRERKVNMGLKGLQICGNSIMPLLTFYGNSIADRFPTHAEQFNQNINSQGYTSATLARRSVDIFQNYVAIALMFGVQAVDLRTYKKTGHYDARACLSPATERLYSAVRHVVGQKPTSDRPYIWNDNEQGLDEHIARISADIAAGGVIVQAVQDILPCLH

SEQ ID NO: 77 - protein, 567 aa, synthetic construct
MKTLSQAQSKTSSQQFSFTGNSSANVIIGNQKLTINDVARVARNGTLVSLTNNTDILQGIQASCDYINNAVESGEPIYGVTSGFGGMANVAISREQASELQHNMVWSMKTGAGNKLPLADVRAAMLLRANSHMRGASGIRLELIKRMEIFLNAGVTPYVYEFGSIGASGDLVPLSYITGSLIGLDPSFKVDFNGKEMDAPTALRQLNLSPLTLLPKEALAMINGTSVMTGIAANCVYDTQILTAIAMGVHALDIQALNGTNQSFHPFIHNSKPHPGQLWAADQMISLLANSQLVRDELDGKHDYRDHELIQDRYSLRCLPQYLGPIVDGISQIAKQIEIEINSVTDNPLIDVDNQASYHGGNFLGQYVGMGMDHLRYYIGLLAKHLDVQIALLASPEFSNGLPPSLLGNRERKVNMGLKGLQICGNSIMPLLTFYGNSIADRFPTHAEQFNQNINSQGYTSATLARRSVDIFQNYVAIALMFGVQAVDLRTYKKTGHYDARACLSPATERLYSAVRHVVGQKPTSDRPYIWNDNEQGLDEHIARISADIAAGGVIVQAVQDILPCLH

SEQ ID NO: 78 - protein, 567 aa, synthetic construct
MKTLSQAQSKTSSQQFSFTGNSSANVIIGNQKLTINDVARVARNGTLVSLTNNTDILQGIQASCDYINNAVESGEPIYGVTSGFGGMANVAISREQASELQSNMVWFQKTGAGNKLPLADVRAAMLLRANSHMRGASGIRLELIKRMEIFLNAGVTPYVYEFGSIGASGDLVPLSYITGSLIGLDPSFKVDFNGKEMDAPTALRQLNLSPLTLLPKEALAMVNGTSVMTGIAANCVYDTQILTAIAMGVHALDIQALNGTNQSFHPFIHNSKPHPGQLWAADQMISLLANSQLVRDELDGKHDYRDHELIQDRYSLRCLPQYLGPIVDGISQIAKQIEIEINSVTDNPLIDVDNQASYHGGNFLGQYVGMGMDHLRYYIGLLAKHLDVQIALLASPEFSNGLPPSLLGNRERKVNMGLKGLQICGNSIMPLLTFYGNSIADRFPTHAEQFNQNINSQGYTSATLARRSVDIFQNYVAIALMFGVQAVDLRTYKKTGHYDARACLSPATERLYSAVRHVVGQKPTSDRPYIWNDNEQGLDEHIARISADIAAGGVIVQAVQDILPCLH

SEQ ID NO: 79 - protein, 567 aa, synthetic construct
MKTLSQAQSKTSSQQFSFTGNSSANVIIGNQKLTINDVARVARNGTLVSLTNNTDILQGIQASCDYINNAVESGEPIYGVTSGFGGMANVAISREQASELQENVVWFMKTGAGNKLPLADVRAAMLLRANSHMRGASGIRLELIKRMEIFLNAGVTPYVYEFGSIGASGDLVPLSYITGSLIGLDPSFKVDFNGKEMDAPTALRQLNLSPLTLLPKEGLAMINGTSVMTGIAANCVYDTQILTAIAMGVHALDIQALNGTNQSFHPFIHNSKPHPGQLWAADQMISLLANSQLVRDELDGKHDYRDHELIQDRYSLRCLPQYLGPIVDGISQIAKQIEIEINSVTDNPLIDVDNQASYHGGNFLGQYVGMGMDHLRYYIGLLAKHLDVQIALLASPEFSNGLPPSLLGNRERKVNMGLKGLQICGNSIMPLLTFYGNSIADRFPTHAEQFNQNINSQGYTSATLARRSVDIFQNYVAIALMFGVQAVDLRTYKKTGHYDARACLSPATERLYSAVRHVVGQKPTSDRPYIWNDNEQGLDEHIARISADIAAGGVIVQAVQDILPCLH

SEQ ID NO: 80 - protein, 567 aa, synthetic construct
MKTLSQAQSKTSSQQFSFTGNSSANVIIGNQKLTINDVARVARNGTLVSLTNNTDILQGIQASCDYINNAVESGEPIYGVTSGFGGMANVAISREQASELQTNLVWYVKTGAGNKLPLADVRAAMLLRANSHMRGASGIRLELIKRMEIFLNAGVTPYVYEFGSIGASGDLVPLSYITGSLIGLDPSFKVDFNGKEMDAPTALRQLNLSPLTLLPKEGLAMVNGTSVMTGIAANCVYDTQILTAIAMGVHALDIQALNGTNQSFHPFIHNSKPHPGQLWAADQMISLLANSQLVRDELDGKHDYRDHELIQDRYSLRCLPQYLGPIVDGISQIAKQIEIEINSVTDNPLIDVDNQASYHGGNFLGQYVGMGMDHLRYYIGLLAKHLDVQIALLASPEFSNGLPPSLLGNRERKVNMGLKGLQICGNSIMPLLTFYGNSIADRFPTHAEQFNQNINSQGYTSATLARRSVDIFQNYVAIALMFGVQAVDLRTYKKTGHYDARACLSPATERLYSAVRHVVGQKPTSDRPYIWNDNEQGLDEHIARISADIAAGGVIVQAVQDILPCLH

SEQ ID NO: 81 - protein, 567 aa, synthetic construct
MKTLSQAQSKTSSQQFSFTGNSSANVIIGNQKLTINDVARVARNGTLVSLTNNTDILQGIQASCDYINNAVESGEPIYGVTSGFGGMANVAISREQASELQTNAVWHVKTGAGNKLPLADVRAAMLLRANSHMRGASGIRLELIKRMEIFLNAGVTPYVYEFGSIGASGDLVPLSYITGSLIGLDPSFKVDFNGKEMDAPTALRQLNLSPLTLLPKEALAMTNGTSVMTGIAANCVYDTQILTAIAMGVHALDIQALNGTNQSFHPFIHNSKPHPGQLWAADQMISLLANSQLVRDELDGKHDYRDHELIQDRYSLRCLPQYLGPIVDGISQIAKQIEIEINSVTDNPLIDVDNQASYHGGNFLGQYVGMGMDHLRYYIGLLAKHLDVQIALLASPEFSNGLPPSLLGNRERKVNMGLKGLQICGNSIMPLLTFYGNSIADRFPTHAEQFNQNINSQGYTSATLARRSVDIFQNYVAIALMFGVQAVDLRTYKKTGHYDARACLSPATERLYSAVRHVVGQKPTSDRPYIWNDNEQGLDEHIARISADIAAGGVIVQAVQDILPCLH

SEQ ID NO: 82 - protein, 567 aa, synthetic construct
MKTLSQAQSKTSSQQFSFTGNSSANVIIGNQKLTINDVARVARNGTLVSLTNNTDILQGIQASCDYINNAVESGEPIYGVTSGFGGMANVAISREQASELQKNAVWHTKTGAGNKLPLADVRAAMLLRANSHMRGASGIRLELIKRMEIFLNAGVTPYVYEFGSIGASGDLVPLSYITGSLIGLDPSFKVDFNGKEMDAPTALRQLNLSPLTLLPKEALAMMNGTSVMTGIAANCVYDTQILTAIAMGVHALDIQALNGTNQSFHPFIHNSKPHPGQLWAADQMISLLANSQLVRDELDGKHDYRDHELIQDRYSLRCLPQYLGPIVDGISQIAKQIEIEINSVTDNPLIDVDNQASYHGGNFLGQYVGMGMDHLRYYIGLLAKHLDVQIALLASPEFSNGLPPSLLGNRERKVNMGLKGLQICGNSIMPLLTFYGNSIADRFPTHAEQFNQNINSQGYTSATLARRSVDIFQNYVAIALMFGVQAVDLRTYKKTGHYDARACLSPATERLYSAVRHVVGQKPTSDRPYIWNDNEQGLDEHIARISADIAAGGVIVQAVQDILPCLH

SEQ ID NO: 83 - protein, 567 aa, synthetic construct
MKTLSQAQSKTSSQQFSFTGNSSANVIIGNQKLTINDVARVARNGTLVSLTNNTDILQGIQASCDYINNAVESGEPIYGVTSGFGGMANVAISREQASELQTNLVWFMKTGAGNKLPLADVRAAMLLRANSHMRGASGIRLELIKRMEIFLNAGVTPYVYEFGSIGASGDLVPLSYITGSLIGLDPSFKVDFNGKEMDAPTALRQLNLSPLTLLPKESLAMINGTSVMTGIAANCVYDTQILTAIAMGVHALDIQALNGTNQSFHPFIHNSKPHPGQLWAADQMISLLANSQLVRDELDGKHDYRDHELIQDRYSLRCLPQYLGPIVDGISQIAKQIEIEINSVTDNPLIDVDNQASYHGGNFLGQYVGMGMDHLRYYIGLLAKHLDVQIALLASPEFSNGLPPSLLGNRERKVNMGLKGLQICGNSIMPLLTFYGNSIADRFPTHAEQFNQNINSQGYTSATLARRSVDIFQNYVAIALMFGVQAVDLRTYKKTGHYDARACLSPATERLYSAVRHVVGQKPTSDRPYIWNDNEQGLDEHIARISADIAAGGVIVQAVQDILPCLH

SEQ ID NO: 84 - protein, 567 aa, synthetic construct
MKTLSQAQSKTSSQQFSFTGNSSANVIIGNQKLTINDVARVARNGTLVSLTNNTDILQGIQASCDYINNAVESGEPIYGVTSGFGGMANVAISREQASELQTNVVWHHKTGAGNKLPLADVRAAMLLRANSHMRGASGIRLELIKRMEIFLNAGVTPYVYEFGSIGASGDLVPLSYITGSLIGLDPSFKVDFNGKEMDAPTALRQLNLSPLTLLPKEGLAMLNGTSVMTGIAANCVYDTQILTAIAMGVHALDIQALNGTNQSFHPFIHNSKPHPGQLWAADQMISLLANSQLVRDELDGKHDYRDHELIQDRYSLRCLPQYLGPIVDGISQIAKQIEIEINSVTDNPLIDVDNQASYHGGNFLGQYVGMGMDHLRYYIGLLAKHLDVQIALLASPEFSNGLPPSLLGNRERKVNMGLKGLQICGNSIMPLLTFYGNSIADRFPTHAEQFNQNINSQGYTSATLARRSVDIFQNYVAIALMFGVQAVDLRTYKKTGHYDARACLSPATERLYSAVRHVVGQKPTSDRPYIWNDNEQGLDEHIARISADIAAGGVIVQAVQDILPCLH

SEQ ID NO: 85 - protein, 567 aa, synthetic construct
MKTLSQAQSKTSSQQFSFTGNSSANVIIGNQKLTINDVARVARNGTLVSLTNNTDILQGIQASCDYINNAVESGEPIYGVTSGFGGMANVAISREQASELQHNLVWHLKTGAGNKLPLADVRAAMLLRANSHMRGASGIRLELIKRMEIFLNAGVTPYVYEFGSIGASGDLVPLSYITGSLIGLDPSFKVDFNGKEMDAPTALRQLNLSPLTLLPKEAIAMVNGTSVMTGIAANCVYDTQILTAIAMGVHALDIQALNGTNQSFHPFIHNSKPHPGQLWAADQMISLLANSQLVRDELDGKHDYRDHELIQDRYSLRCLPQYLGPIVDGISQIAKQIEIEINSVTDNPLIDVDNQASYHGGNFLGQYVGMGMDHLRYYIGLLAKHLDVQIALLASPEFSNGLPPSLLGNRERKVNMGLKGLQICGNSIMPLLTFYGNSIADRFPTHAEQFNQNINSQGYTSATLARRSVDIFQNYVAIALMFGVQAVDLRTYKKTGHYDARACLSPATERLYSAVRHVVGQKPTSDRPYIWNDNEQGLDEHIARISADIAAGGVIVQAVQDILPCLH

SEQ ID NO: 86 - protein, 567 aa, synthetic construct
MKTLSQAQSKTSSQQFSFTGNSSANVIIGNQKLTINDVARVARNGTLVSLTNNTDILQGIQASCDYINNAVESGEPIYGVTSGFGGMANVAISREQASELQENVVWHHKTGAGNKLPLADVRAAMLLRANSHMRGASGIRLELIKRMEIFLNAGVTPYVYEFGSIGASGDLVPLSYITGSLIGLDPSFKVDFNGKEMDAPTALRQLNLSPLTLLPKEGLAMINGTSVMTGIAANCVYDTQILTAIAMGVHALDIQALNGTNQSFHPFIHNSKPHPGQLWAADQMISLLANSQLVRDELDGKHDYRDHELIQDRYSLRCLPQYLGPIVDGISQIAKQIEIEINSVTDNPLIDVDNQASYHGGNFLGQYVGMGMDHLRYYIGLLAKHLDVQIALLASPEFSNGLPPSLLGNRERKVNMGLKGLQICGNSIMPLLTFYGNSIADRFPTHAEQFNQNINSQGYTSATLARRSVDIFQNYVAIALMFGVQAVDLRTYKKTGHYDARACLSPATERLYSAVRHVVGQKPTSDRPYIWNDNEQGLDEHIARISADIAAGGVIVQAVQDILPCLH

SEQ ID NO: 87 - protein, 567 aa, synthetic construct
MKTLSQAQSKTSSQQFSFTGNSSANVIIGNQKLTINDVARVARNGTLVSLTNNTDILQGIQASCDYINNAVESGEPIYGVTSGFGGMANVAISREQASELQTNAVWFMKTGAGNKLPLADVRAAMLLRANSHMRGASGIRLELIKRMEIFLNAGVTPYVYEFGSIGASGDLVPLSYITGSLIGLDPSFKVDFNGKEMDAPTALRQLNLSPLTLLPKEGIAMNNGTSVMTGIAANCVYDTQILTAIAMGVHALDIQALNGTNQSFHPFIHNSKPHPGQLWAADQMISLLANSQLVRDELDGKHDYRDHELIQDRYSLRCLPQYLGPIVDGISQIAKQIEIEINSVTDNPLIDVDNQASYHGGNFLGQYVGMGMDHLRYYIGLLAKHLDVQIALLASPEFSNGLPPSLLGNRERKVNMGLKGLQICGNSIMPLLTFYGNSIADRFPTHAEQFNQNINSQGYTSATLARRSVDIFQNYVAIALMFGVQAVDLRTYKKTGHYDARACLSPATERLYSAVRHVVGQKPTSDRPYIWNDNEQGLDEHIARISADIAAGGVIVQAVQDILPCLH

SEQ ID NO: 88 - protein, 567 aa, synthetic construct
MKTLSQAQSKTSSQQFSFTGNSSANVIIGNQKLTINDVARVARNGTLVSLTNNTDILQGIQASCDYINNAVESGEPIYGVTSGFGGMANVAISREQASELQKNLVWYLKTGAGNKLPLADVRAAMLLRANSHMRGASGIRLELIKRMEIFLNAGVTPYVYEFGSIGASGDLVPLSYITGSLIGLDPSFKVDFNGKEMDAPTALRQLNLSPLTLLPKEGIAMINGTSVMTGIAANCVYDTQILTAIAMGVHALDIQALNGTNQSFHPFIHNSKPHPGQLWAADQMISLLANSQLVRDELDGKHDYRDHELIQDRYSLRCLPQYLGPIVDGISQIAKQIEIEINSVTDNPLIDVDNQASYHGGNFLGQYVGMGMDHLRYYIGLLAKHLDVQIALLASPEFSNGLPPSLLGNRERKVNMGLKGLQICGNSIMPLLTFYGNSIADRFPTHAEQFNQNINSQGYTSATLARRSVDIFQNYVAIALMFGVQAVDLRTYKKTGHYDARACLSPATERLYSAVRHVVGQKPTSDRPYIWNDNEQGLDEHIARISADIAAGGVIVQAVQDILPCLH

SEQ ID NO: 89 - protein, 567 aa, synthetic construct
MKTLSQAQSKTSSQQFSFTGNSSANVIIGNQKLTINDVARVARNGTLVSLTNNTDILQGIQASCDYINNAVESGEPIYGVTSGFGGMANVAISREQASELQTNLVWSQKTGAGNKLPLADVRAAMLLRANSHMRGASGIRLELIKRMEIFLNAGVTPYVYEFGSIGASGDLVPLSYITGSLIGLDPSFKVDFNGKEMDAPTALRQLNLSPLTLLPKEGIAMVNGTSVMTGIAANCVYDTQILTAIAMGVHALDIQALNGTNQSFHPFIHNSKPHPGQLWAADQMISLLANSQLVRDELDGKHDYRDHELIQDRYSLRCLPQYLGPIVDGISQIAKQIEIEINSVTDNPLIDVDNQASYHGGNFLGQYVGMGMDHLRYYIGLLAKHLDVQIALLASPEFSNGLPPSLLGNRERKVNMGLKGLQICGNSIMPLLTFYGNSIADRFPTHAEQFNQNINSQGYTSATLARRSVDIFQNYVAIALMFGVQAVDLRTYKKTGHYDARACLSPATERLYSAVRHVVGQKPTSDRPYIWNDNEQGLDEHIARISADIAAGGVIVQAVQDILPCLH

SEQ ID NO: 90 - protein, 567 aa, synthetic construct
MKTLSQAQSKTSSQQFSFTGNSSANVIIGNQKLTINDVARVARNGTLVSLTNNTDILQGIQASCDYINNAVESGEPIYGVTSGFGGMANVAISREQASELQENIVWYHKTGAGNKLPLADVRAAMLLRANSHMRGASGIRLELIKRMEIFLNAGVTPYVYEFGSIGASGDLVPLSYITGSLIGLDPSFKVDFNGKEMDAPTALRQLNLSPLTLLPKEGLAMNNGTSVMTGIAANCVYDTQILTAIAMGVHALDIQALNGTNQSFHPFIHNSKPHPGQLWAADQMISLLANSQLVRDELDGKHDYRDHELIQDRYSLRCLPQYLGPIVDGISQIAKQIEIEINSVTDNPLIDVDNQASYHGGNFLGQYVGMGMDHLRYYIGLLAKHLDVQIALLASPEFSNGLPPSLLGNRERKVNMGLKGLQICGNSIMPLLTFYGNSIADRFPTHAEQFNQNINSQGYTSATLARRSVDIFQNYVAIALMFGVQAVDLRTYKKTGHYDARACLSPATERLYSAVRHVVGQKPTSDRPYIWNDNEQGLDEHIARISADIAAGGVIVQAVQDILPCLH

SEQ ID NO: 91 - protein, 567 aa, synthetic construct
MKTLSQAQSKTSSQQFSFTGNSSANVIIGNQKLTINDVARVARNGTLVSLTNNTDILQGIQASCDYINNAVESGEPIYGVTSGFGGMANVAISREQASELQHNLVWYMKTGAGNKLPLADVRAAMLLRANSHMRGASGIRLELIKRMEIFLNAGVTPYVYEFGSIGASGDLVPLSYITGSLIGLDPSFKVDFNGKEMDAPTALRQLNLSPLTLLPKEGLAMLNGTSVMTGIAANCVYDTQILTAIAMGVHALDIQALNGTNQSFHPFIHNSKPHPGQLWAADQMISLLANSQLVRDELDGKHDYRDHELIQDRYSLRCLPQYLGPIVDGISQIAKQIEIEINSVTDNPLIDVDNQASYHGGNFLGQYVGMGMDHLRYYIGLLAKHLDVQIALLASPEFSNGLPPSLLGNRERKVNMGLKGLQICGNSIMPLLTFYGNSIADRFPTHAEQFNQNINSQGYTSATLARRSVDIFQNYVAIALMFGVQAVDLRTYKKTGHYDARACLSPATERLYSAVRHVVGQKPTSDRPYIWNDNEQGLDEHIARISADIAAGGVIVQAVQDILPCLH

SEQ ID NO: 92 - protein, 567 aa, synthetic construct
MKTLSQAQSKTSSQQFSFTGNSSANVIIGNQKLTINDVARVARNGTLVSLTNNTDILQGIQASCDYINNAVESGEPIYGVTSGFGGMANVAISREQASELQENVVWYHKTGAGNKLPLADVRAAMLLRANSHMRGASGIRLELIKRMEIFLNAGVTPYVYEFGSIGASGDLVPLSYITGSLIGLDPSFKVDFNGKEMDAPTALRQLNLSPLTLLPKEGIAMTNGTSVMTGIAANCVYDTQILTAIAMGVHALDIQALNGTNQSFHPFIHNSKPHPGQLWAADQMISLLANSQLVRDELDGKHDYRDHELIQDRYSLRCLPQYLGPIVDGISQIAKQIEIEINSVTDNPLIDVDNQASYHGGNFLGQYVGMGMDHLRYYIGLLAKHLDVQIALLASPEFSNGLPPSLLGNRERKVNMGLKGLQICGNSIMPLLTFYGNSIADRFPTHAEQFNQNINSQGYTSATLARRSVDIFQNYVAIALMFGVQAVDLRTYKKTGHYDARACLSPATERLYSAVRHVVGQKPTSDRPYIWNDNEQGLDEHIARISADIAAGGVIVQAVQDILPCLH

SEQ ID NO: 93 - protein, 567 aa, synthetic construct
MKTLSQAQSKTSSQQFSFTGNSSANVIIGNQKLTINDVARVARNGTLVSLTNNTDILQGIQASCDYINNAVESGEPIYGVTSGFGGMANVAISREQASELQENLVWYLKTGAGNKLPLADVRAAMLLRANSHMRGASGIRLELIKRMEIFLNAGVTPYVYEFGSIGASGDLVPLSYITGSLIGLDPSFKVDFNGKEMDAPTALRQLNLSPLTLLPKESIAMVNGTSVMTGIAANCVYDTQILTAIAMGVHALDIQALNGTNQSFHPFIHNSKPHPGQLWAADQMISLLANSQLVRDELDGKHDYRDHELIQDRYSLRCLPQYLGPIVDGISQIAKQIEIEINSVTDNPLIDVDNQASYHGGNFLGQYVGMGMDHLRYYIGLLAKHLDVQIALLASPEFSNGLPPSLLGNRERKVNMGLKGLQICGNSIMPLLTFYGNSIADRFPTHAEQFNQNINSQGYTSATLARRSVDIFQNYVAIALMFGVQAVDLRTYKKTGHYDARACLSPATERLYSAVRHVVGQKPTSDRPYIWNDNEQGLDEHIARISADIAAGGVIVQAVQDILPCLH

SEQ ID NO: 94 - protein, 567 aa, synthetic construct
MKTLSQAQSKTSSQQFSFTGNSSANVIIGNQKLTINDVARVARNGTLVSLTNNTDILQGIQASCDYINNAVESGEPIYGVTSGFGGMANVAISREQASELQTNLVWSHKTGAGNKLPLADVRAAMLLRANSHMRGASGIRLELIKRMEIFLNAGVTPYVYEFGSIGASGDLVPLSYITGSLIGLDPSFKVDFNGKEMDAPTALRQLNLSPLTLLPKESIAMLNGTSVMTGIAANCVYDTQILTAIAMGVHALDIQALNGTNQSFHPFIHNSKPHPGQLWAADQMISLLANSQLVRDELDGKHDYRDHELIQDRYSLRCLPQYLGPIVDGISQIAKQIEIEINSVTDNPLIDVDNQASYHGGNFLGQYVGMGMDHLRYYIGLLAKHLDVQIALLASPEFSNGLPPSLLGNRERKVNMGLKGLQICGNSIMPLLTFYGNSIADRFPTHAEQFNQNINSQGYTSATLARRSVDIFQNYVAIALMFGVQAVDLRTYKKTGHYDARACLSPATERLYSAVRHVVGQKPTSDRPYIWNDNEQGLDEHIARISADIAAGGVIVQAVQDILPCLH

SEQ ID NO: 95 - protein, 567 aa, synthetic construct
MKTLSQAQSKTSSQQFSFTGNSSANVIIGNQKLTINDVARVARNGTLVSLTNNTDILQGIQASCDYINNAVESGEPIYGVTSGFGGMANVAISREQASELQENVVWHLKTGAGNKLPLADVRAAMLLRANSHMRGASGIRLELIKRMEIFLNAGVTPYVYEFGSIGASGDLVPLSYITGSLIGLDPSFKVDFNGKEMDAPTALRQLNLSPLTLLPKEGIAMVNGTSVMTGIAANCVYDTQILTAIAMGVHALDIQALNGTNQSFHPFIHNSKPHPGQLWAADQMISLLANSQLVRDELDGKHDYRDHELIQDRYSLRCLPQYLGPIVDGISQIAKQIEIEINSVTDNPLIDVDNQASYHGGNFLGQYVGMGMDHLRYYIGLLAKHLDVQIALLASPEFSNGLPPSLLGNRERKVNMGLKGLQICGNSIMPLLTFYGNSIADRFPTHAEQFNQNINSQGYTSATLARRSVDIFQNYVAIALMFGVQAVDLRTYKKTGHYDARACLSPATERLYSAVRHVVGQKPTSDRPYIWNDNEQGLDEHIARISADIAAGGVIVQAVQDILPCLH

SEQ ID NO: 96 - protein, 567 aa, synthetic construct
MKTLSQAQSKTSSQQFSFTGNSSANVIIGNQKLTINDVARVARNGTLVSLTNNTDILQGIQASCDYINNAVESGEPIYGVTSGFGGMANVAISREQASELQTNAVWFVKTGAGNKLPLADVRAAMLLRANSHMRGASGIRLELIKRMEIFLNAGVTPYVYEFGSIGASGDLVPLSYITGSLIGLDPSFKVDFNGKEMDAPTALRQLNLSPLTLLPKEAIAMLNGTSVMTGIAANCVYDTQILTAIAMGVHALDIQALNGTNQSFHPFIHNSKPHPGQLWAADQMISLLANSQLVRDELDGKHDYRDHELIQDRYSLRCLPQYLGPIVDGISQIAKQIEIEINSVTDNPLIDVDNQASYHGGNFLGQYVGMGMDHLRYYIGLLAKHLDVQIALLASPEFSNGLPPSLLGNRERKVNMGLKGLQICGNSIMPLLTFYGNSIADRFPTHAEQFNQNINSQGYTSATLARRSVDIFQNYVAIALMFGVQAVDLRTYKKTGHYDARACLSPATERLYSAVRHVVGQKPTSDRPYIWNDNEQGLDEHIARISADIAAGGVIVQAVQDILPCLH

SEQ ID NO: 97 - protein, 567 aa, synthetic construct
MKTLSQAQSKTSSQQFSFTGNSSANVIIGNQKLTINDVARVARNGTLVSLTNNTDILQGIQASCDYINNAVESGEPIYGVTSGFGGMANVAISREQASELQENIVWFMKTGAGNKLPLADVRAAMLLRANSHMRGASGIRLELIKRMEIFLNAGVTPYVYEFGSIGASGDLVPLSYITGSLIGLDPSFKVDFNGKEMDAPTALRQLNLSPLTLLPKEGLAMINGTSVMTGIAANCVYDTQILTAIAMGVHALDIQALNGTNQSFHPFIHNSKPHPGQLWAADQMISLLANSQLVRDELDGKHDYRDHELIQDRYSLRCLPQYLGPIVDGISQIAKQIEIEINSVTDNPLIDVDNQASYHGGNFLGQYVGMGMDHLRYYIGLLAKHLDVQIALLASPEFSNGLPPSLLGNRERKVNMGLKGLQICGNSIMPLLTFYGNSIADRFPTHAEQFNQNINSQGYTSATLARRSVDIFQNYVAIALMFGVQAVDLRTYKKTGHYDARACLSPATERLYSAVRHVVGQKPTSDRPYIWNDNEQGLDEHIARISADIAAGGVIVQAVQDILPCLH

SEQ ID NO: 98 - protein, 567 aa, synthetic construct
MKTLSQAQSKTSSQQFSFTGNSSANVIIGNQKLTINDVARVARNGTLVSLTNNTDILQGIQASCDYINNAVESGEPIYGVTSGFGGMANVAISREQASELQHNVVWFHKTGAGNKLPLADVRAAMLLRANSHMRGASGIRLELIKRMEIFLNAGVTPYVYEFGSIGASGDLVPLSYITGSLIGLDPSFKVDFNGKEMDAPTALRQLNLSPLTLLPKEGIAMLNGTSVMTGIAANCVYDTQILTAIAMGVHALDIQALNGTNQSFHPFIHNSKPHPGQLWAADQMISLLANSQLVRDELDGKHDYRDHELIQDRYSLRCLPQYLGPIVDGISQIAKQIEIEINSVTDNPLIDVDNQASYHGGNFLGQYVGMGMDHLRYYIGLLAKHLDVQIALLASPEFSNGLPPSLLGNRERKVNMGLKGLQICGNSIMPLLTFYGNSIADRFPTHAEQFNQNINSQGYTSATLARRSVDIFQNYVAIALMFGVQAVDLRTYKKTGHYDARACLSPATERLYSAVRHVVGQKPTSDRPYIWNDNEQGLDEHIARISADIAAGGVIVQAVQDILPCLH

SEQ ID NO: 99 - protein, 567 aa, synthetic construct
MKTLSQAQSKTSSQQFSFTGNSSANVIIGNQKLTINDVARVARNGTLVSLTNNTDILQGIQASCDYINNAVESGEPIYGVTSGFGGMANVAISREQASELQHNVVWFHKTGAGNKLPLADVRAAMLLRANSHMRGASGIRLELIKRMEIFLNAGVTPYVYEFGSIGASGDLVPLSYITGSLIGLDPSFKVDFNGKEMDAPTALRQLNLSPLTLLPKEGLAMINGTSVMTGIAANCVYDTQILTAIAMGVHALDIQALNGTNQSFHPFIHNSKPHPGQLWAADQMISLLANSQLVRDELDGKHDYRDHELIQDRYSLRCLPQYLGPIVDGISQIAKQIEIEINSVTDNPLIDVDNQASYHGGNFLGQYVGMGMDHLRYYIGLLAKHLDVQIALLASPEFSNGLPPSLLGNRERKVNMGLKGLQICGNSIMPLLTFYGNSIADRFPTHAEQFNQNINSQGYTSATLARRSVDIFQNYVAIALMFGVQAVDLRTYKKTGHYDARACLSPATERLYSAVRHVVGQKPTSDRPYIWNDNEQGLDEHIARISADIAAGGVIVQAVQDILPCLH

SEQ ID NO: 100 - protein, 567 aa, synthetic construct
MKTLSQAQSKTSSQQFSFTGNSSANVIIGNQKLTINDVARVARNGTLVSLTNNTDILQGIQASCDYINNAVESGEPIYGVTSGFGGMANVAISREQASELQENLVWHHKTGAGNKLPLADVRAAMLLRANSHMRGASGIRLELIKRMEIFLNAGVTPYVYEFGSIGASGDLVPLSYITGSLIGLDPSFKVDFNGKEMDAPTALRQLNLSPLTLLPKEAIAMMNGTSVMTGIAANCVYDTQILTAIAMGVHALDIQALNGTNQSFHPFIHNSKPHPGQLWAADQMISLLANSQLVRDELDGKHDYRDHELIQDRYSLRCLPQYLGPIVDGISQIAKQIEIEINSVTDNPLIDVDNQASYHGGNFLGQYVGMGMDHLRYYIGLLAKHLDVQIALLASPEFSNGLPPSLLGNRERKVNMGLKGLQICGNSIMPLLTFYGNSIADRFPTHAEQFNQNINSQGYTSATLARRSVDIFQNYVAIALMFGVQAVDLRTYKKTGHYDARACLSPATERLYSAVRHVVGQKPTSDRPYIWNDNEQGLDEHIARISADIAAGGVIVQAVQDILPCLH

SEQ ID NO: 101 - protein, 567 aa, synthetic construct
MKTLSQAQSKTSSQQFSFTGNSSANVIIGNQKLTINDVARVARNGTLVSLTNNTDILQGIQASCDYINNAVESGEPIYGVTSGFGGMANVAISREQASELQENLVWYLKTGAGNKLPLADVRAAMLLRANSHMRGASGIRLELIKRMEIFLNAGVTPYVYEFGSIGASGDLVPLSYITGSLIGLDPSFKVDFNGKEMDAPTALRQLNLSPLTLLPKESLAMVNGTSVMTGIAANCVYDTQILTAIAMGVHALDIQALNGTNQSFHPFIHNSKPHPGQLWAADQMISLLANSQLVRDELDGKHDYRDHELIQDRYSLRCLPQYLGPIVDGISQIAKQIEIEINSVTDNPLIDVDNQASYHGGNFLGQYVGMGMDHLRYYIGLLAKHLDVQIALLASPEFSNGLPPSLLGNRERKVNMGLKGLQICGNSIMPLLTFYGNSIADRFPTHAEQFNQNINSQGYTSATLARRSVDIFQNYVAIALMFGVQAVDLRTYKKTGHYDARACLSPATERLYSAVRHVVGQKPTSDRPYIWNDNEQGLDEHIARISADIAAGGVIVQAVQDILPCLH

SEQ ID NO: 102 - protein, 567 aa, synthetic construct
MKTLSQAQSKTSSQQFSFTGNSSANVIIGNQKLTINDVARVARNGTLVSLTNNTDILQGIQASCDYINNAVESGEPIYGVTSGFGGMANVAISREQASELQSNLVWFMKTGAGNKLPLADVRAAMLLRANSHMRGASGIRLELIKRMEIFLNAGVTPYVYEFGSIGASGDLVPLSYITGSLIGLDPSFKVDFNGKEMDAPTALRQLNLSPLTLLPKEGIAMINGTSVMTGIAANCVYDTQILTAIAMGVHALDIQALNGTNQSFHPFIHNSKPHPGQLWAADQMISLLANSQLVRDELDGKHDYRDHELIQDRYSLRCLPQYLGPIVDGISQIAKQIEIEINSVTDNPLIDVDNQASYHGGNFLGQYVGMGMDHLRYYIGLLAKHLDVQIALLASPEFSNGLPPSLLGNRERKVNMGLKGLQICGNSIMPLLTFYGNSIADRFPTHAEQFNQNINSQGYTSATLARRSVDIFQNYVAIALMFGVQAVDLRTYKKTGHYDARACLSPATERLYSAVRHVVGQKPTSDRPYIWNDNEQGLDEHIARISADIAAGGVIVQAVQDILPCLH

SEQ ID NO: 103 - protein, 567 aa, synthetic construct
MKTLSQAQSKTSSQQFSFTGNSSANVIIGNQKLTINDVARVARNGTLVSLTNNTDILQGIQASCDYINNAVESGEPIYGVTSGFGGMANVAISREQASELQSNLVWHLKTGAGNKLPLADVRAAMLLRANSHMRGASGIRLELIKRMEIFLNAGVTPYVYEFGSIGASGDLVPLSYITGSLIGLDPSFKVDFNGKEMDAPTALRQLNLSPLTLLPKEALAMTNGTSVMTGIAANCVYDTQILTAIAMGVHALDIQALNGTNQSFHPFIHNSKPHPGQLWAADQMISLLANSQLVRDELDGKHDYRDHELIQDRYSLRCLPQYLGPIVDGISQIAKQIEIEINSVTDNPLIDVDNQASYHGGNFLGQYVGMGMDHLRYYIGLLAKHLDVQIALLASPEFSNGLPPSLLGNRERKVNMGLKGLQICGNSIMPLLTFYGNSIADRFPTHAEQFNQNINSQGYTSATLARRSVDIFQNYVAIALMFGVQAVDLRTYKKTGHYDARACLSPATERLYSAVRHVVGQKPTSDRPYIWNDNEQGLDEHIARISADIAAGGVIVQAVQDILPCLH

SEQ ID NO: 104 - protein, 567 aa, synthetic construct
MKTLSQAQSKTSSQQFSFTGNSSANVIIGNQKLTINDVARVARNGTLVSLTNNTDILQGIQASCDYINNAVESGEPIYGVTSGFGGMANVAISREQASELQTNAVWHLKTGAGNKLPLADVRAAMLLRANSHMRGASGIRLELIKRMEIFLNAGVTPYVYEFGSIGASGDLVPLSYITGSLIGLDPSFKVDFNGKEMDAPTALRQLNLSPLTLLPKEGIAMINGTSVMTGIAANCVYDTQILTAIAMGVHALDIQALNGTNQSFHPFIHNSKPHPGQLWAADQMISLLANSQLVRDELDGKHDYRDHELIQDRYSLRCLPQYLGPIVDGISQIAKQIEIEINSVTDNPLIDVDNQASYHGGNFLGQYVGMGMDHLRYYIGLLAKHLDVQIALLASPEFSNGLPPSLLGNRERKVNMGLKGLQICGNSIMPLLTFYGNSIADRFPTHAEQFNQNINSQGYTSATLARRSVDIFQNYVAIALMFGVQAVDLRTYKKTGHYDARACLSPATERLYSAVRHVVGQKPTSDRPYIWNDNEQGLDEHIARISADIAAGGVIVQAVQDILPCLH

SEQ ID NO: 105 - protein, 567 aa, synthetic construct
MKTLSQAQSKTSSQQFSFTGNSSANVIIGNQKLTINDVARVARNGTLVSLTNNTDILQGIQASCDYINNAVESGEPIYGVTSGFGGMANVAISREQASELQSNLVWYLKTGAGNKLPLADVRAAMLLRANSHMRGASGIRLELIKRMEIFLNAGVTPYVYEFGSIGASGDLVPLSYITGSLIGLDPSFKVDFNGKEMDAPTALRQLNLSPLTLLPKEGIAMLNGTSVMTGIAANCVYDTQILTAIAMGVHALDIQALNGTNQSFHPFIHNSKPHPGQLWAADQMISLLANSQLVRDELDGKHDYRDHELIQDRYSLRCLPQYLGPIVDGISQIAKQIEIEINSVTDNPLIDVDNQASYHGGNFLGQYVGMGMDHLRYYIGLLAKHLDVQIALLASPEFSNGLPPSLLGNRERKVNMGLKGLQICGNSIMPLLTFYGNSIADRFPTHAEQFNQNINSQGYTSATLARRSVDIFQNYVAIALMFGVQAVDLRTYKKTGHYDARACLSPATERLYSAVRHVVGQKPTSDRPYIWNDNEQGLDEHIARISADIAAGGVIVQAVQDILPCLH

SEQ ID NO: 106 - protein, 567 aa, synthetic construct
MKTLSQAQSKTSSQQFSFTGNSSANVIIGNQKLTINDVARVARNGTLVSLTNNTDILQGIQASCDYINNAVESGEPIYGVTSGFGGMANVAISREQASELQENLVWYMKTGAGNKLPLADVRAAMLLRANSHMRGASGIRLELIKRMEIFLNAGVTPYVYEFGSIGASGDLVPLSYITGSLIGLDPSFKVDFNGKEMDAPTALRQLNLSPLTLLPKEALAMVNGTSVMTGIAANCVYDTQILTAIAMGVHALDIQALNGTNQSFHPFIHNSKPHPGQLWAADQMISLLANSQLVRDELDGKHDYRDHELIQDRYSLRCLPQYLGPIVDGISQIAKQIEIEINSVTDNPLIDVDNQASYHGGNFLGQYVGMGMDHLRYYIGLLAKHLDVQIALLASPEFSNGLPPSLLGNRERKVNMGLKGLQICGNSIMPLLTFYGNSIADRFPTHAEQFNQNINSQGYTSATLARRSVDIFQNYVAIALMFGVQAVDLRTYKKTGHYDARACLSPATERLYSAVRHVVGQKPTSDRPYIWNDNEQGLDEHIARISADIAAGGVIVQAVQDILPCLH

SEQ ID NO: 107 - protein, 567 aa, synthetic construct
MKTLSQAQSKTSSQQFSFTGNSSANVIIGNQKLTINDVARVARNGTLVSLTNNTDILQGIQASCDYINNAVESGEPIYGVTSGFGGMANVAISREQASELQENMVWSTKTGAGNKLPLADVRAAMLLRANSHMRGASGIRLELIKRMEIFLNAGVTPYVYEFGSIGASGDLVPLSYITGSLIGLDPSFKVDFNGKEMDAPTALRQLNLSPLTLLPKESIAMVNGTSVMTGIAANCVYDTQILTAIAMGVHALDIQALNGTNQSFHPFIHNSKPHPGQLWAADQMISLLANSQLVRDELDGKHDYRDHELIQDRYSLRCLPQYLGPIVDGISQIAKQIEIEINSVTDNPLIDVDNQASYHGGNFLGQYVGMGMDHLRYYIGLLAKHLDVQIALLASPEFSNGLPPSLLGNRERKVNMGLKGLQICGNSIMPLLTFYGNSIADRFPTHAEQFNQNINSQGYTSATLARRSVDIFQNYVAIALMFGVQAVDLRTYKKTGHYDARACLSPATERLYSAVRHVVGQKPTSDRPYIWNDNEQGLDEHIARISADIAAGGVIVQAVQDILPCLH

SEQ ID NO: 108 - protein, 567 aa, synthetic construct
MKTLSQAQSKTSSQQFSFTGNSSANVIIGNQKLTINDVARVARNGTLVSLTNNTDILQGIQASCDYINNAVESGEPIYGVTSGFGGMANVAISREQASELQSNVVWHHKTGAGNKLPLADVRAAMLLRANSHMRGASGIRLELIKRMEIFLNAGVTPYVYEFGSIGASGDLVPLSYITGSLIGLDPSFKVDFNGKEMDAPTALRQLNLSPLTLLPKEGLAMMNGTSVMTGIAANCVYDTQILTAIAMGVHALDIQALNGTNQSFHPFIHNSKPHPGQLWAADQMISLLANSQLVRDELDGKHDYRDHELIQDRYSLRCLPQYLGPIVDGISQIAKQIEIEINSVTDNPLIDVDNQASYHGGNFLGQYVGMGMDHLRYYIGLLAKHLDVQIALLASPEFSNGLPPSLLGNRERKVNMGLKGLQICGNSIMPLLTFYGNSIADRFPTHAEQFNQNINSQGYTSATLARRSVDIFQNYVAIALMFGVQAVDLRTYKKTGHYDARACLSPATERLYSAVRHVVGQKPTSDRPYIWNDNEQGLDEHIARISADIAAGGVIVQAVQDILPCLH

SEQ ID NO: 109 - protein, 567 aa, synthetic construct
MKTLSQAQSKTSSQQFSFTGNSSANVIIGNQKLTINDVARVARNGTLVSLTNNTDILQGIQASCDYINNAVESGEPIYGVTSGFGGMANVAISREQASELQENLVWYMKTGAGNKLPLADVRAAMLLRANSHMRGASGIRLELIKRMEIFLNAGVTPYVYEFGSIGASGDLVPLSYITGSLIGLDPSFKVDFNGKEMDAPTALRQLNLSPLTLLPKEGIAMINGTSVMTGIAANCVYDTQILTAIAMGVHALDIQALNGTNQSFHPFIHNSKPHPGQLWAADQMISLLANSQLVRDELDGKHDYRDHELIQDRYSLRCLPQYLGPIVDGISQIAKQIEIEINSVTDNPLIDVDNQASYHGGNFLGQYVGMGMDHLRYYIGLLAKHLDVQIALLASPEFSNGLPPSLLGNRERKVNMGLKGLQICGNSIMPLLTFYGNSIADRFPTHAEQFNQNINSQGYTSATLARRSVDIFQNYVAIALMFGVQAVDLRTYKKTGHYDARACLSPATERLYSAVRHVVGQKPTSDRPYIWNDNEQGLDEHIARISADIAAGGVIVQAVQDILPCLH

SEQ ID NO: 110 - protein, 567 aa, synthetic construct
MKTLSQAQSKTSSQQFSFTGNSSANVIIGNQKLTINDVARVARNGTLVSLTNNTDILQGIQASCDYINNAVESGEPIYGVTSGFGGMANVAISREQASELQKNLVWSHKTGAGNKLPLADVRAAMLLRANSHMRGASGIRLELIKRMEIFLNAGVTPYVYEFGSIGASGDLVPLSYITGSLIGLDPSFKVDFNGKEMDAPTALRQLNLSPLTLLPKEAIAMLNGTSVMTGIAANCVYDTQILTAIAMGVHALDIQALNGTNQSFHPFIHNSKPHPGQLWAADQMISLLANSQLVRDELDGKHDYRDHELIQDRYSLRCLPQYLGPIVDGISQIAKQIEIEINSVTDNPLIDVDNQASYHGGNFLGQYVGMGMDHLRYYIGLLAKHLDVQIALLASPEFSNGLPPSLLGNRERKVNMGLKGLQICGNSIMPLLTFYGNSIADRFPTHAEQFNQNINSQGYTSATLARRSVDIFQNYVAIALMFGVQAVDLRTYKKTGHYDARACLSPATERLYSAVRHVVGQKPTSDRPYIWNDNEQGLDEHIARISADIAAGGVIVQAVQDILPCLH

SEQ ID NO: 111 - protein, 567 aa, synthetic construct
MKTLSQAQSKTSSQQFSFTGNSSANVIIGNQKLTINDVARVARNGTLVSLTNNTDILQGIQASCDYINNAVESGEPIYGVTSGFGGMANVAISREQASELQKNAVWYTKTGAGNKLPLADVRAAMLLRANSHMRGASGIRLELIKRMEIFLNAGVTPYVYEFGSIGASGDLVPLSYITGSLIGLDPSFKVDFNGKEMDAPTALRQLNLSPLTLLPKESIAMLNGTSVMTGIAANCVYDTQILTAIAMGVHALDIQALNGTNQSFHPFIHNSKPHPGQLWAADQMISLLANSQLVRDELDGKHDYRDHELIQDRYSLRCLPQYLGPIVDGISQIAKQIEIEINSVTDNPLIDVDNQASYHGGNFLGQYVGMGMDHLRYYIGLLAKHLDVQIALLASPEFSNGLPPSLLGNRERKVNMGLKGLQICGNSIMPLLTFYGNSIADRFPTHAEQFNQNINSQGYTSATLARRSVDIFQNYVAIALMFGVQAVDLRTYKKTGHYDARACLSPATERLYSAVRHVVGQKPTSDRPYIWNDNEQGLDEHIARISADIAAGGVIVQAVQDILPCLH

SEQ ID NO: 112 - protein, 567 aa, synthetic construct
MKTLSQAQSKTSSQQFSFTGNSSANVIIGNQKLTINDVARVARNGTLVSLTNNTDILQGIQASCDYINNAVESGEPIYGVTSGFGGMANVAISREQASELQENMVWHLKTGAGNKLPLADVRAAMLLRANSHMRGASGIRLELIKRMEIFLNAGVTPYVYEFGSIGASGDLVPLSYITGSLIGLDPSFKVDFNGKEMDAPTALRQLNLSPLTLLPKESLAMVNGTSVMTGIAANCVYDTQILTAIAMGVHALDIQALNGTNQSFHPFIHNSKPHPGQLWAADQMISLLANSQLVRDELDGKHDYRDHELIQDRYSLRCLPQYLGPIVDGISQIAKQIEIEINSVTDNPLIDVDNQASYHGGNFLGQYVGMGMDHLRYYIGLLAKHLDVQIALLASPEFSNGLPPSLLGNRERKVNMGLKGLQICGNSIMPLLTFYGNSIADRFPTHAEQFNQNINSQGYTSATLARRSVDIFQNYVAIALMFGVQAVDLRTYKKTGHYDARACLSPATERLYSAVRHVVGQKPTSDRPYIWNDNEQGLDEHIARISADIAAGGVIVQAVQDILPCLH

SEQ ID NO: 113 - protein, 567 aa, synthetic construct
MKTLSQAQSKTSSQQFSFTGNSSANVIIGNQKLTINDVARVARNGTLVSLTNNTDILQGIQASCDYINNAVESGEPIYGVTSGFGGMANVAISREQASELQSNVVWSHKTGAGNKLPLADVRAAMLLRANSHMRGASGIRLELIKRMEIFLNAGVTPYVYEFGSIGASGDLVPLSYITGSLIGLDPSFKVDFNGKEMDAPTALRQLNLSPLTLLPKEGIAMINGTSVMTGIAANCVYDTQILTAIAMGVHALDIQALNGTNQSFHPFIHNSKPHPGQLWAADQMISLLANSQLVRDELDGKHDYRDHELIQDRYSLRCLPQYLGPIVDGISQIAKQIEIEINSVTDNPLIDVDNQASYHGGNFLGQYVGMGMDHLRYYIGLLAKHLDVQIALLASPEFSNGLPPSLLGNRERKVNMGLKGLQICGNSIMPLLTFYGNSIADRFPTHAEQFNQNINSQGYTSATLARRSVDIFQNYVAIALMFGVQAVDLRTYKKTGHYDARACLSPATERLYSAVRHVVGQKPTSDRPYIWNDNEQGLDEHIARISADIAAGGVIVQAVQDILPCLH

SEQ ID NO: 114 - protein, 567 aa, synthetic construct
MKTLSQAQSKTSSQQFSFTGNSSANVIIGNQKLTINDVARVARNGTLVSLTNNTDILQGIQASCDYINNAVESGEPIYGVTSGFGGMANVAISREQASELQENMVWFMKTGAGNKLPLADVRAAMLLRANSHMRGASGIRLELIKRMEIFLNAGVTPYVYEFGSIGASGDLVPLSYITGSLIGLDPSFKVDFNGKEMDAPTALRQLNLSPLTLLPKEAIAMTNGTSVMTGIAANCVYDTQILTAIAMGVHALDIQALNGTNQSFHPFIHNSKPHPGQLWAADQMISLLANSQLVRDELDGKHDYRDHELIQDRYSLRCLPQYLGPIVDGISQIAKQIEIEINSVTDNPLIDVDNQASYHGGNFLGQYVGMGMDHLRYYIGLLAKHLDVQIALLASPEFSNGLPPSLLGNRERKVNMGLKGLQICGNSIMPLLTFYGNSIADRFPTHAEQFNQNINSQGYTSATLARRSVDIFQNYVAIALMFGVQAVDLRTYKKTGHYDARACLSPATERLYSAVRHVVGQKPTSDRPYIWNDNEQGLDEHIARISADIAAGGVIVQAVQDILPCLH

SEQ ID NO: 115 - protein, 567 aa, synthetic construct
MKTLSQAQSKTSSQQFSFTGNSSANVIIGNQKLTINDVARVARNGTLVSLTNNTDILQGIQASCDYINNAVESGEPIYGVTSGFGGMANVAISREQASELQENVVWYHKTGAGNKLPLADVRAAMLLRANSHMRGASGIRLELIKRMEIFLNAGVTPYVYEFGSIGASGDLVPLSYITGSLIGLDPSFKVDFNGKEMDAPTALRQLNLSPLTLLPKESLAMMNGTSVMTGIAANCVYDTQILTAIAMGVHALDIQALNGTNQSFHPFIHNSKPHPGQLWAADQMISLLANSQLVRDELDGKHDYRDHELIQDRYSLRCLPQYLGPIVDGISQIAKQIEIEINSVTDNPLIDVDNQASYHGGNFLGQYVGMGMDHLRYYIGLLAKHLDVQIALLASPEFSNGLPPSLLGNRERKVNMGLKGLQICGNSIMPLLTFYGNSIADRFPTHAEQFNQNINSQGYTSATLARRSVDIFQNYVAIALMFGVQAVDLRTYKKTGHYDARACLSPATERLYSAVRHVVGQKPTSDRPYIWNDNEQGLDEHIARISADIAAGGVIVQAVQDILPCLH

SEQ ID NO: 116 - protein, 567 aa, synthetic construct
MKTLSQAQSKTSSQQFSFTGNSSANVIIGNQKLTINDVARVARNGTLVSLTNNTDILQGIQASCDYINNAVESGEPIYGVTSGFGGMANVAISREQASELQHNVVWSTKTGAGNKLPLADVRAAMLLRANSHMRGASGIRLELIKRMEIFLNAGVTPYVYEFGSIGASGDLVPLSYITGSLIGLDPSFKVDFNGKEMDAPTALRQLNLSPLTLLPKEALAMTNGTSVMTGIAANCVYDTQILTAIAMGVHALDIQALNGTNQSFHPFIHNSKPHPGQLWAADQMISLLANSQLVRDELDGKHDYRDHELIQDRYSLRCLPQYLGPIVDGISQIAKQIEIEINSVTDNPLIDVDNQASYHGGNFLGQYVGMGMDHLRYYIGLLAKHLDVQIALLASPEFSNGLPPSLLGNRERKVNMGLKGLQICGNSIMPLLTFYGNSIADRFPTHAEQFNQNINSQGYTSATLARRSVDIFQNYVAIALMFGVQAVDLRTYKKTGHYDARACLSPATERLYSAVRHVVGQKPTSDRPYIWNDNEQGLDEHIARISADIAAGGVIVQAVQDILPCLH

SEQ ID NO: 117 - protein, 567 aa, synthetic construct
MKTLSQAQSKTSSQQFSFTGNSSANVIIGNQKLTINDVARVARNGTLVSLTNNTDILQGIQASCDYINNAVESGEPIYGVTSGFGGMANVAISREQASELQSNLVWHLKTGAGNKLPLADVRAAMLLRANSHMRGASGIRLELIKRMEIFLNAGVTPYVYEFGSIGASGDLVPLSYITGSLIGLDPSFKVDFNGKEMDAPTALRQLNLSPLTLLPKEGIAMINGTSVMTGIAANCVYDTQILTAIAMGVHALDIQALNGTNQSFHPFIHNSKPHPGQLWAADQMISLLANSQLVRDELDGKHDYRDHELIQDRYSLRCLPQYLGPIVDGISQIAKQIEIEINSVTDNPLIDVDNQASYHGGNFLGQYVGMGMDHLRYYIGLLAKHLDVQIALLASPEFSNGLPPSLLGNRERKVNMGLKGLQICGNSIMPLLTFYGNSIADRFPTHAEQFNQNINSQGYTSATLARRSVDIFQNYVAIALMFGVQAVDLRTYKKTGHYDARACLSPATERLYSAVRHVVGQKPTSDRPYIWNDNEQGLDEHIARISADIAAGGVIVQAVQDILPCLH

SEQ ID NO: 118 - protein, 567 aa, synthetic construct
MKTLSQAQSKTSSQQFSFTGNSSANVIIGNQKLTINDVARVARNGTLVSLTNNTDILQGIQASCDYINNAVESGEPIYGVTSGFGGMANVAISREQASELQSNAVWHLKTGAGNKLPLADVRAAMLLRANSHMRGASGIRLELIKRMEIFLNAGVTPYVYEFGSIGASGDLVPLSYITGSLIGLDPSFKVDFNGKEMDAPTALRQLNLSPLTLLPKEGLAMLNGTSVMTGIAANCVYDTQILTAIAMGVHALDIQALNGTNQSFHPFIHNSKPHPGQLWAADQMISLLANSQLVRDELDGKHDYRDHELIQDRYSLRCLPQYLGPIVDGISQIAKQIEIEINSVTDNPLIDVDNQASYHGGNFLGQYVGMGMDHLRYYIGLLAKHLDVQIALLASPEFSNGLPPSLLGNRERKVNMGLKGLQICGNSIMPLLTFYGNSIADRFPTHAEQFNQNINSQGYTSATLARRSVDIFQNYVAIALMFGVQAVDLRTYKKTGHYDARACLSPATERLYSAVRHVVGQKPTSDRPYIWNDNEQGLDEHIARISADIAAGGVIVQAVQDILPCLH

SEQ ID NO: 119 - protein, 567 aa, synthetic construct
MKTLSQAQSKTSSQQFSFTGNSSANVIIGNQKLTINDVARVARNGTLVSLTNNTDILQGIQASCDYINNAVESGEPIYGVTSGFGGMANVAISREQASELQKNMVWYHKTGAGNKLPLADVRAAMLLRANSHMRGASGIRLELIKRMEIFLNAGVTPYVYEFGSIGASGDLVPLSYITGSLIGLDPSFKVDFNGKEMDAPTALRQLNLSPLTLLPKEALAMINGTSVMTGIAANCVYDTQILTAIAMGVHALDIQALNGTNQSFHPFIHNSKPHPGQLWAADQMISLLANSQLVRDELDGKHDYRDHELIQDRYSLRCLPQYLGPIVDGISQIAKQIEIEINSVTDNPLIDVDNQASYHGGNFLGQYVGMGMDHLRYYIGLLAKHLDVQIALLASPEFSNGLPPSLLGNRERKVNMGLKGLQICGNSIMPLLTFYGNSIADRFPTHAEQFNQNINSQGYTSATLARRSVDIFQNYVAIALMFGVQAVDLRTYKKTGHYDARACLSPATERLYSAVRHVVGQKPTSDRPYIWNDNEQGLDEHIARISADIAAGGVIVQAVQDILPCLH

SEQ ID NO: 120 - protein, 567 aa, synthetic construct
MKTLSQAQSKTSSQQFSFTGNSSANVIIGNQKLTINDVARVARNGTLVSLTNNTDILQGIQASCDYINNAVESGEPIYGVTSGFGGMANVAISREQASELQENAVWFMKTGAGNKLPLADVRAAMLLRANSHMRGASGIRLELIKRMEIFLNAGVTPYVYEFGSIGASGDLVPLSYITGSLIGLDPSFKVDFNGKEMDAPTALRQLNLSPLTLLPKEGLAMVNGTSVMTGIAANCVYDTQILTAIAMGVHALDIQALNGTNQSFHPFIHNSKPHPGQLWAADQMISLLANSQLVRDELDGKHDYRDHELIQDRYSLRCLPQYLGPIVDGISQIAKQIEIEINSVTDNPLIDVDNQASYHGGNFLGQYVGMGMDHLRYYIGLLAKHLDVQIALLASPEFSNGLPPSLLGNRERKVNMGLKGLQICGNSIMPLLTFYGNSIADRFPTHAEQFNQNINSQGYTSATLARRSVDIFQNYVAIALMFGVQAVDLRTYKKTGHYDARACLSPATERLYSAVRHVVGQKPTSDRPYIWNDNEQGLDEHIARISADIAAGGVIVQAVQDILPCLH

SEQ ID NO: 121 - protein, 567 aa, synthetic construct
MKTLSQAQSKTSSQQFSFTGNSSANVIIGNQKLTINDVARVARNGTLVSLTNNTDILQGIQASCDYINNAVESGEPIYGVTSGFGGMANVAISREQASELQHNVVWHTKTGAGNKLPLADVRAAMLLRANSHMRGASGIRLELIKRMEIFLNAGVTPYVYEFGSIGASGDLVPLSYITGSLIGLDPSFKVDFNGKEMDAPTALRQLNLSPLTLLPKEGLAMINGTSVMTGIAANCVYDTQILTAIAMGVHALDIQALNGTNQSFHPFIHNSKPHPGQLWAADQMISLLANSQLVRDELDGKHDYRDHELIQDRYSLRCLPQYLGPIVDGISQIAKQIEIEINSVTDNPLIDVDNQASYHGGNFLGQYVGMGMDHLRYYIGLLAKHLDVQIALLASPEFSNGLPPSLLGNRERKVNMGLKGLQICGNSIMPLLTFYGNSIADRFPTHAEQFNQNINSQGYTSATLARRSVDIFQNYVAIALMFGVQAVDLRTYKKTGHYDARACLSPATERLYSAVRHVVGQKPTSDRPYIWNDNEQGLDEHIARISADIAAGGVIVQAVQDILPCLH

SEQ ID NO: 122 - protein, 567 aa, synthetic construct
MKTLSQAQSKTSSQQFSFTGNSSANVIIGNQKLTINDVARVARNGTLVSLTNNTDILQGIQASCDYINNAVESGEPIYGVTSGFGGMANVAISREQASELQENLVWYVKTGAGNKLPLADVRAAMLLRANSHMRGASGIRLELIKRMEIFLNAGVTPYVYEFGSIGASGDLVPLSYITGSLIGLDPSFKVDFNGKEMDAPTALRQLNLSPLTLLPKEGLAMVNGTSVMTGIAANCVYDTQILTAIAMGVHALDIQALNGTNQSFHPFIHNSKPHPGQLWAADQMISLLANSQLVRDELDGKHDYRDHELIQDRYSLRCLPQYLGPIVDGISQIAKQIEIEINSVTDNPLIDVDNQASYHGGNFLGQYVGMGMDHLRYYIGLLAKHLDVQIALLASPEFSNGLPPSLLGNRERKVNMGLKGLQICGNSIMPLLTFYGNSIADRFPTHAEQFNQNINSQGYTSATLARRSVDIFQNYVAIALMFGVQAVDLRTYKKTGHYDARACLSPATERLYSAVRHVVGQKPTSDRPYIWNDNEQGLDEHIARISADIAAGGVIVQAVQDILPCLH

SEQ ID NO: 123 - protein, 567 aa, synthetic construct
MKTLSQAQSKTSSQQFSFTGNSSANVIIGNQKLTINDVARVARNGTLVSLTNNTDILQGIQASCDYINNAVESGEPIYGVTSGFGGMANVAISREQASELQENAVWYLKTGAGNKLPLADVRAAMLLRANSHMRGASGIRLELIKRMEIFLNAGVTPYVYEFGSIGASGDLVPLSYITGSLIGLDPSFKVDFNGKEMDAPTALRQLNLSPLTLLPKEGLAMNNGTSVMTGIAANCVYDTQILTAIAMGVHALDIQALNGTNQSFHPFIHNSKPHPGQLWAADQMISLLANSQLVRDELDGKHDYRDHELIQDRYSLRCLPQYLGPIVDGISQIAKQIEIEINSVTDNPLIDVDNQASYHGGNFLGQYVGMGMDHLRYYIGLLAKHLDVQIALLASPEFSNGLPPSLLGNRERKVNMGLKGLQICGNSIMPLLTFYGNSIADRFPTHAEQFNQNINSQGYTSATLARRSVDIFQNYVAIALMFGVQAVDLRTYKKTGHYDARACLSPATERLYSAVRHVVGQKPTSDRPYIWNDNEQGLDEHIARISADIAAGGVIVQAVQDILPCLH

SEQ ID NO: 124 - protein, 567 aa, synthetic construct
MKTLSQAQSKTSSQQFSFTGNSSANVIIGNQKLTINDVARVARNGTLVSLTNNTDILQGIQASCDYINNAVESGEPIYGVTSGFGGMANVAISREQASELQENLVWSTKTGAGNKLPLADVRAAMLLRANSHMRGASGIRLELIKRMEIFLNAGVTPYVYEFGSIGASGDLVPLSYITGSLIGLDPSFKVDFNGKEMDAPTALRQLNLSPLTLLPKEAIAMINGTSVMTGIAANCVYDTQILTAIAMGVHALDIQALNGTNQSFHPFIHNSKPHPGQLWAADQMISLLANSQLVRDELDGKHDYRDHELIQDRYSLRCLPQYLGPIVDGISQIAKQIEIEINSVTDNPLIDVDNQASYHGGNFLGQYVGMGMDHLRYYIGLLAKHLDVQIALLASPEFSNGLPPSLLGNRERKVNMGLKGLQICGNSIMPLLTFYGNSIADRFPTHAEQFNQNINSQGYTSATLARRSVDIFQNYVAIALMFGVQAVDLRTYKKTGHYDARACLSPATERLYSAVRHVVGQKPTSDRPYIWNDNEQGLDEHIARISADIAAGGVIVQAVQDILPCLH

SEQ ID NO: 125 - protein, 567 aa, synthetic construct
MKTLSQAQSKTSSQQFSFTGNSSANVIIGNQKLTINDVARVARNGTLVSLTNNTDILQGIQASCDYINNAVESGEPIYGVTSGFGGMANVAISREQASELQHNAVWHTKTGAGNKLPLADVRAAMLLRANSHMRGASGIRLELIKRMEIFLNAGVTPYVYEFGSIGASGDLVPLSYITGSLIGLDPSFKVDFNGKEMDAPTALRQLNLSPLTLLPKESIAMLNGTSVMTGIAANCVYDTQILTAIAMGVHALDIQALNGTNQSFHPFIHNSKPHPGQLWAADQMISLLANSQLVRDELDGKHDYRDHELIQDRYSLRCLPQYLGPIVDGISQIAKQIEIEINSVTDNPLIDVDNQASYHGGNFLGQYVGMGMDHLRYYIGLLAKHLDVQIALLASPEFSNGLPPSLLGNRERKVNMGLKGLQICGNSIMPLLTFYGNSIADRFPTHAEQFNQNINSQGYTSATLARRSVDIFQNYVAIALMFGVQAVDLRTYKKTGHYDARACLSPATERLYSAVRHVVGQKPTSDRPYIWNDNEQGLDEHIARISADIAAGGVIVQAVQDILPCLH

SEQ ID NO: 126 - protein, 567 aa, synthetic construct
MKTLSQAQSKTSSQQFSFTGNSSANVIIGNQKLTINDVARVARNGTLVSLTNNTDILQGIQASCDYINNAVESGEPIYGVTSGFGGMANVAISREQASELQHNMVWHLKTGAGNKLPLADVRAAMLLRANSHMRGASGIRLELIKRMEIFLNAGVTPYVYEFGSIGASGDLVPLSYITGSLIGLDPSFKVDFNGKEMDAPTALRQLNLSPLTLLPKEGIAMLNGTSVMTGIAANCVYDTQILTAIAMGVHALDIQALNGTNQSFHPFIHNSKPHPGQLWAADQMISLLANSQLVRDELDGKHDYRDHELIQDRYSLRCLPQYLGPIVDGISQIAKQIEIEINSVTDNPLIDVDNQASYHGGNFLGQYVGMGMDHLRYYIGLLAKHLDVQIALLASPEFSNGLPPSLLGNRERKVNMGLKGLQICGNSIMPLLTFYGNSIADRFPTHAEQFNQNINSQGYTSATLARRSVDIFQNYVAIALMFGVQAVDLRTYKKTGHYDARACLSPATERLYSAVRHVVGQKPTSDRPYIWNDNEQGLDEHIARISADIAAGGVIVQAVQDILPCLH

SEQ ID NO: 127 - protein, 567 aa, synthetic construct
MKTLSQAQSKTSSQQFSFTGNSSANVIIGNQKLTINDVARVARNGTLVSLTNNTDILQGIQASCDYINNAVESGEPIYGVTSGFGGMANVAISREQASELQENLVWYMKTGAGNKLPLADVRAAMLLRANSHMRGASGIRLELIKRMEIFLNAGVTPYVYEFGSIGASGDLVPLSYITGSLIGLDPSFKVDFNGKEMDAPTALRQLNLSPLTLLPKEALAMINGTSVMTGIAANCVYDTQILTAIAMGVHALDIQALNGTNQSFHPFIHNSKPHPGQLWAADQMISLLANSQLVRDELDGKHDYRDHELIQDRYSLRCLPQYLGPIVDGISQIAKQIEIEINSVTDNPLIDVDNQASYHGGNFLGQYVGMGMDHLRYYIGLLAKHLDVQIALLASPEFSNGLPPSLLGNRERKVNMGLKGLQICGNSIMPLLTFYGNSIADRFPTHAEQFNQNINSQGYTSATLARRSVDIFQNYVAIALMFGVQAVDLRTYKKTGHYDARACLSPATERLYSAVRHVVGQKPTSDRPYIWNDNEQGLDEHIARISADIAAGGVIVQAVQDILPCLH

SEQ ID NO: 128 - protein, 567 aa, synthetic construct
MKTLSQAQSKTSSQQFSFTGNSSANVIIGNQKLTINDVARVARNGTLVSLTNNTDILQGIQASCDYINNAVESGEPIYGVTSGFGGMANVAISREQASELQENMVWHVKTGAGNKLPLADVRAAMLLRANSHMRGASGIRLELIKRMEIFLNAGVTPYVYEFGSIGASGDLVPLSYITGSLIGLDPSFKVDFNGKEMDAPTALRQLNLSPLTLLPKEGIAMLNGTSVMTGIAANCVYDTQILTAIAMGVHALDIQALNGTNQSFHPFIHNSKPHPGQLWAADQMISLLANSQLVRDELDGKHDYRDHELIQDRYSLRCLPQYLGPIVDGISQIAKQIEIEINSVTDNPLIDVDNQASYHGGNFLGQYVGMGMDHLRYYIGLLAKHLDVQIALLASPEFSNGLPPSLLGNRERKVNMGLKGLQICGNSIMPLLTFYGNSIADRFPTHAEQFNQNINSQGYTSATLARRSVDIFQNYVAIALMFGVQAVDLRTYKKTGHYDARACLSPATERLYSAVRHVVGQKPTSDRPYIWNDNEQGLDEHIARISADIAAGGVIVQAVQDILPCLH

SEQ ID NO: 129 - protein, 567 aa, synthetic construct
MKTLSQAQSKTSSQQFSFTGNSSANVIIGNQKLTINDVARVARNGTLVSLTNNTDILQGIQASCDYINNAVESGEPIYGVTSGFGGMANVAISREQASELQHNLVWYHKTGAGNKLPLADVRAAMLLRANSHMRGASGIRLELIKRMEIFLNAGVTPYVYEFGSIGASGDLVPLSYITGSLIGLDPSFKVDFNGKEMDAPTALRQLNLSPLTLLPKESLAMLNGTSVMTGIAANCVYDTQILTAIAMGVHALDIQALNGTNQSFHPFIHNSKPHPGQLWAADQMISLLANSQLVRDELDGKHDYRDHELIQDRYSLRCLPQYLGPIVDGISQIAKQIEIEINSVTDNPLIDVDNQASYHGGNFLGQYVGMGMDHLRYYIGLLAKHLDVQIALLASPEFSNGLPPSLLGNRERKVNMGLKGLQICGNSIMPLLTFYGNSIADRFPTHAEQFNQNINSQGYTSATLARRSVDIFQNYVAIALMFGVQAVDLRTYKKTGHYDARACLSPATERLYSAVRHVVGQKPTSDRPYIWNDNEQGLDEHIARISADIAAGGVIVQAVQDILPCLH

SEQ ID NO: 130 - protein, 567 aa, synthetic construct
MKTLSQAQSKTSSQQFSFTGNSSANVIIGNQKLTINDVARVARNGTLVSLTNNTDILQGIQASCDYINNAVESGEPIYGVTSGFGGMANVAISREQASELQTNMVWFMKTGAGNKLPLADVRAAMLLRANSHMRGASGIRLELIKRMEIFLNAGVTPYVYEFGSIGASGDLVPLSYITGSLIGLDPSFKVDFNGKEMDAPTALRQLNLSPLTLLPKEGIAMLNGTSVMTGIAANCVYDTQILTAIAMGVHALDIQALNGTNQSFHPFIHNSKPHPGQLWAADQMISLLANSQLVRDELDGKHDYRDHELIQDRYSLRCLPQYLGPIVDGISQIAKQIEIEINSVTDNPLIDVDNQASYHGGNFLGQYVGMGMDHLRYYIGLLAKHLDVQIALLASPEFSNGLPPSLLGNRERKVNMGLKGLQICGNSIMPLLTFYGNSIADRFPTHAEQFNQNINSQGYTSATLARRSVDIFQNYVAIALMFGVQAVDLRTYKKTGHYDARACLSPATERLYSAVRHVVGQKPTSDRPYIWNDNEQGLDEHIARISADIAAGGVIVQAVQDILPCLH

SEQ ID NO: 131 - protein, 567 aa, synthetic construct
MKTLSQAQSKTSSQQFSFTGNSSANVIIGNQKLTINDVARVARNGTLVSLTNNTDILQGIQASCDYINNAVESGEPIYGVTSGFGGMANVAISREQASELQTNIVWYHKTGAGNKLPLADVRAAMLLRANSHMRGASGIRLELIKRMEIFLNAGVTPYVYEFGSIGASGDLVPLSYITGSLIGLDPSFKVDFNGKEMDAPTALRQLNLSPLTLLPKEALAMVNGTSVMTGIAANCVYDTQILTAIAMGVHALDIQALNGTNQSFHPFIHNSKPHPGQLWAADQMISLLANSQLVRDELDGKHDYRDHELIQDRYSLRCLPQYLGPIVDGISQIAKQIEIEINSVTDNPLIDVDNQASYHGGNFLGQYVGMGMDHLRYYIGLLAKHLDVQIALLASPEFSNGLPPSLLGNRERKVNMGLKGLQICGNSIMPLLTFYGNSIADRFPTHAEQFNQNINSQGYTSATLARRSVDIFQNYVAIALMFGVQAVDLRTYKKTGHYDARACLSPATERLYSAVRHVVGQKPTSDRPYIWNDNEQGLDEHIARISADIAAGGVIVQAVQDILPCLH

SEQ ID NO: 132 - protein, 567 aa, synthetic construct
MKTLSQAQSKTSSQQFSFTGNSSANVIIGNQKLTINDVARVARNGTLVSLTNNTDILQGIQASCDYINNAVESGEPIYGVTSGFGGMANVAISREQASELQENMVWSLKTGAGNKLPLADVRAAMLLRANSHMRGASGIRLELIKRMEIFLNAGVTPYVYEFGSIGASGDLVPLSYITGSLIGLDPSFKVDFNGKEMDAPTALRQLNLSPLTLLPKEAIAMNNGTSVMTGIAANCVYDTQILTAIAMGVHALDIQALNGTNQSFHPFIHNSKPHPGQLWAADQMISLLANSQLVRDELDGKHDYRDHELIQDRYSLRCLPQYLGPIVDGISQIAKQIEIEINSVTDNPLIDVDNQASYHGGNFLGQYVGMGMDHLRYYIGLLAKHLDVQIALLASPEFSNGLPPSLLGNRERKVNMGLKGLQICGNSIMPLLTFYGNSIADRFPTHAEQFNQNINSQGYTSATLARRSVDIFQNYVAIALMFGVQAVDLRTYKKTGHYDARACLSPATERLYSAVRHVVGQKPTSDRPYIWNDNEQGLDEHIARISADIAAGGVIVQAVQDILPCLH

SEQ ID NO: 133 - protein, 567 aa, synthetic construct
MKTLSQAQSKTSSQQFSFTGNSSANVIIGNQKLTINDVARVARNGTLVSLTNNTDILQGIQASCDYINNAVESGEPIYGVTSGFGGMANVAISREQASELQENAVWHLKTGAGNKLPLADVRAAMLLRANSHMRGASGIRLELIKRMEIFLNAGVTPYVYEFGSIGASGDLVPLSYITGSLIGLDPSFKVDFNGKEMDAPTALRQLNLSPLTLLPKEGLAMINGTSVMTGIAANCVYDTQILTAIAMGVHALDIQALNGTNQSFHPFIHNSKPHPGQLWAADQMISLLANSQLVRDELDGKHDYRDHELIQDRYSLRCLPQYLGPIVDGISQIAKQIEIEINSVTDNPLIDVDNQASYHGGNFLGQYVGMGMDHLRYYIGLLAKHLDVQIALLASPEFSNGLPPSLLGNRERKVNMGLKGLQICGNSIMPLLTFYGNSIADRFPTHAEQFNQNINSQGYTSATLARRSVDIFQNYVAIALMFGVQAVDLRTYKKTGHYDARACLSPATERLYSAVRHVVGQKPTSDRPYIWNDNEQGLDEHIARISADIAAGGVIVQAVQDILPCLH

SEQ ID NO: 134 - protein, 567 aa, synthetic construct
MKTLSQAQSKTSSQQFSFTGNSSANVIIGNQKLTINDVARVARNGTLVSLTNNTDILQGIQASCDYINNAVESGEPIYGVTSGFGGMANVAISREQASELQTNVVWYHKTGAGNKLPLADVRAAMLLRANSHMRGASGIRLELIKRMEIFLNAGVTPYVYEFGSIGASGDLVPLSYITGSLIGLDPSFKVDFNGKEMDAPTALRQLNLSPLTLLPKEALAMINGTSVMTGIAANCVYDTQILTAIAMGVHALDIQALNGTNQSFHPFIHNSKPHPGQLWAADQMISLLANSQLVRDELDGKHDYRDHELIQDRYSLRCLPQYLGPIVDGISQIAKQIEIEINSVTDNPLIDVDNQASYHGGNFLGQYVGMGMDHLRYYIGLLAKHLDVQIALLASPEFSNGLPPSLLGNRERKVNMGLKGLQICGNSIMPLLTFYGNSIADRFPTHAEQFNQNINSQGYTSATLARRSVDIFQNYVAIALMFGVQAVDLRTYKKTGHYDARACLSPATERLYSAVRHVVGQKPTSDRPYIWNDNEQGLDEHIARISADIAAGGVIVQAVQDILPCLH

SEQ ID NO: 135 - protein, 567 aa, synthetic construct
MKTLSQAQSKTSSQQFSFTGNSSANVIIGNQKLTINDVARVARNGTLVSLTNNTDILQGIQASCDYINNAVESGEPIYGVTSGFGGMANVAISREQASELQENIVWSHKTGAGNKLPLADVRAAMLLRANSHMRGASGIRLELIKRMEIFLNAGVTPYVYEFGSIGASGDLVPLSYITGSLIGLDPSFKVDFNGKEMDAPTALRQLNLSPLTLLPKEGIAMLNGTSVMTGIAANCVYDTQILTAIAMGVHALDIQALNGTNQSFHPFIHNSKPHPGQLWAADQMISLLANSQLVRDELDGKHDYRDHELIQDRYSLRCLPQYLGPIVDGISQIAKQIEIEINSVTDNPLIDVDNQASYHGGNFLGQYVGMGMDHLRYYIGLLAKHLDVQIALLASPEFSNGLPPSLLGNRERKVNMGLKGLQICGNSIMPLLTFYGNSIADRFPTHAEQFNQNINSQGYTSATLARRSVDIFQNYVAIALMFGVQAVDLRTYKKTGHYDARACLSPATERLYSAVRHVVGQKPTSDRPYIWNDNEQGLDEHIARISADIAAGGVIVQAVQDILPCLH

SEQ ID NO: 136 - protein, 567 aa, synthetic construct
MKTLSQAQSKTSSQQFSFTGNSSANVIIGNQKLTINDVARVARNGTLVSLTNNTDILQGIQASCDYINNAVESGEPIYGVTSGFGGMANVAISREQASELQKNMVWFMKTGAGNKLPLADVRAAMLLRANSHMRGASGIRLELIKRMEIFLNAGVTPYVYEFGSIGASGDLVPLSYITGSLIGLDPSFKVDFNGKEMDAPTALRQLNLSPLTLLPKEALAMMNGTSVMTGIAANCVYDTQILTAIAMGVHALDIQALNGTNQSFHPFIHNSKPHPGQLWAADQMISLLANSQLVRDELDGKHDYRDHELIQDRYSLRCLPQYLGPIVDGISQIAKQIEIEINSVTDNPLIDVDNQASYHGGNFLGQYVGMGMDHLRYYIGLLAKHLDVQIALLASPEFSNGLPPSLLGNRERKVNMGLKGLQICGNSIMPLLTFYGNSIADRFPTHAEQFNQNINSQGYTSATLARRSVDIFQNYVAIALMFGVQAVDLRTYKKTGHYDARACLSPATERLYSAVRHVVGQKPTSDRPYIWNDNEQGLDEHIARISADIAAGGVIVQAVQDILPCLH

SEQ ID NO: 137 - protein, 567 aa, synthetic construct
MKTLSQAQSKTSSQQFSFTGNSSANVIIGNQKLTINDVARVARNGTLVSLTNNTDILQGIQASCDYINNAVESGEPIYGVTSGFGGMANVAISREQASELQENLVWYTKTGAGNKLPLADVRAAMLLRANSHMRGASGIRLELIKRMEIFLNAGVTPYVYEFGSIGASGDLVPLSYITGSLIGLDPSFKVDFNGKEMDAPTALRQLNLSPLTLLPKEAIAMINGTSVMTGIAANCVYDTQILTAIAMGVHALDIQALNGTNQSFHPFIHNSKPHPGQLWAADQMISLLANSQLVRDELDGKHDYRDHELIQDRYSLRCLPQYLGPIVDGISQIAKQIEIEINSVTDNPLIDVDNQASYHGGNFLGQYVGMGMDHLRYYIGLLAKHLDVQIALLASPEFSNGLPPSLLGNRERKVNMGLKGLQICGNSIMPLLTFYGNSIADRFPTHAEQFNQNINSQGYTSATLARRSVDIFQNYVAIALMFGVQAVDLRTYKKTGHYDARACLSPATERLYSAVRHVVGQKPTSDRPYIWNDNEQGLDEHIARISADIAAGGVIVQAVQDILPCLH

SEQ ID NO: 138 - protein, 567 aa, synthetic construct
MKTLSQAQSKTSSQQFSFTGNSSANVIIGNQKLTINDVARVARNGTLVSLTNNTDILQGIQASCDYINNAVESGEPIYGVTSGFGGMANVAISREQASELQSNIVWHVKTGAGNKLPLADVRAAMLLRANSHMRGASGIRLELIKRMEIFLNAGVTPYVYEFGSIGASGDLVPLSYITGSLIGLDPSFKVDFNGKEMDAPTALRQLNLSPLTLLPKEGLAMLNGTSVMTGIAANCVYDTQILTAIAMGVHALDIQALNGTNQSFHPFIHNSKPHPGQLWAADQMISLLANSQLVRDELDGKHDYRDHELIQDRYSLRCLPQYLGPIVDGISQIAKQIEIEINSVTDNPLIDVDNQASYHGGNFLGQYVGMGMDHLRYYIGLLAKHLDVQIALLASPEFSNGLPPSLLGNRERKVNMGLKGLQICGNSIMPLLTFYGNSIADRFPTHAEQFNQNINSQGYTSATLARRSVDIFQNYVAIALMFGVQAVDLRTYKKTGHYDARACLSPATERLYSAVRHVVGQKPTSDRPYIWNDNEQGLDEHIARISADIAAGGVIVQAVQDILPCLH

SEQ ID NO: 139 - protein, 567 aa, synthetic construct
MKTLSQAQSKTSSQQFSFTGNSSANVIIGNQKLTINDVARVARNGTLVSLTNNTDILQGIQASCDYINNAVESGEPIYGVTSGFGGMANVAISREQASELQKNLVWFMKTGAGNKLPLADVRAAMLLRANSHMRGASGIRLELIKRMEIFLNAGVTPYVYEFGSIGASGDLVPLSYITGSLIGLDPSFKVDFNGKEMDAPTALRQLNLSPLTLLPKEAIAMLNGTSVMTGIAANCVYDTQILTAIAMGVHALDIQALNGTNQSFHPFIHNSKPHPGQLWAADQMISLLANSQLVRDELDGKHDYRDHELIQDRYSLRCLPQYLGPIVDGISQIAKQIEIEINSVTDNPLIDVDNQASYHGGNFLGQYVGMGMDHLRYYIGLLAKHLDVQIALLASPEFSNGLPPSLLGNRERKVNMGLKGLQICGNSIMPLLTFYGNSIADRFPTHAEQFNQNINSQGYTSATLARRSVDIFQNYVAIALMFGVQAVDLRTYKKTGHYDARACLSPATERLYSAVRHVVGQKPTSDRPYIWNDNEQGLDEHIARISADIAAGGVIVQAVQDILPCLH

SEQ ID NO: 140 - protein, 567 aa, synthetic construct
MKTLSQAQSKTSSQQFSFTGNSSANVIIGNQKLTINDVARVARNGTLVSLTNNTDILQGIQASCDYINNAVESGEPIYGVTSGFGGMANVAISREQASELQSNLVWSHKTGAGNKLPLADVRAAMLLRANSHMRGASGIRLELIKRMEIFLNAGVTPYVYEFGSIGASGDLVPLSYITGSLIGLDPSFKVDFNGKEMDAPTALRQLNLSPLTLLPKESLAMVNGTSVMTGIAANCVYDTQILTAIAMGVHALDIQALNGTNQSFHPFIHNSKPHPGQLWAADQMISLLANSQLVRDELDGKHDYRDHELIQDRYSLRCLPQYLGPIVDGISQIAKQIEIEINSVTDNPLIDVDNQASYHGGNFLGQYVGMGMDHLRYYIGLLAKHLDVQIALLASPEFSNGLPPSLLGNRERKVNMGLKGLQICGNSIMPLLTFYGNSIADRFPTHAEQFNQNINSQGYTSATLARRSVDIFQNYVAIALMFGVQAVDLRTYKKTGHYDARACLSPATERLYSAVRHVVGQKPTSDRPYIWNDNEQGLDEHIARISADIAAGGVIVQAVQDILPCLH

SEQ ID NO: 141 - protein, 567 aa, synthetic construct
MKTLSQAQSKTSSQQFSFTGNSSANVIIGNQKLTINDVARVARNGTLVSLTNNTDILQGIQASCDYINNAVESGEPIYGVTSGFGGMANVAISREQASELQHNLVWFHKTGAGNKLPLADVRAAMLLRANSHMRGASGIRLELIKRMEIFLNAGVTPYVYEFGSIGASGDLVPLSYITGSLIGLDPSFKVDFNGKEMDAPTALRQLNLSPLTLLPKEGIAMLNGTSVMTGIAANCVYDTQILTAIAMGVHALDIQALNGTNQSFHPFIHNSKPHPGQLWAADQMISLLANSQLVRDELDGKHDYRDHELIQDRYSLRCLPQYLGPIVDGISQIAKQIEIEINSVTDNPLIDVDNQASYHGGNFLGQYVGMGMDHLRYYIGLLAKHLDVQIALLASPEFSNGLPPSLLGNRERKVNMGLKGLQICGNSIMPLLTFYGNSIADRFPTHAEQFNQNINSQGYTSATLARRSVDIFQNYVAIALMFGVQAVDLRTYKKTGHYDARACLSPATERLYSAVRHVVGQKPTSDRPYIWNDNEQGLDEHIARISADIAAGGVIVQAVQDILPCLH

SEQ ID NO: 142 - protein, 567 aa, synthetic construct
MKTLSQAQSKTSSQQFSFTGNSSANVIIGNQKLTINDVARVARNGTLVSLTNNTDILQGIQASCDYINNAVESGEPIYGVTSGFGGMANVAISREQASELQSNAVWHVKTGAGNKLPLADVRAAMLLRANSHMRGASGIRLELIKRMEIFLNAGVTPYVYEFGSIGASGDLVPLSYITGSLIGLDPSFKVDFNGKEMDAPTALRQLNLSPLTLLPKEGLAMLNGTSVMTGIAANCVYDTQILTAIAMGVHALDIQALNGTNQSFHPFIHNSKPHPGQLWAADQMISLLANSQLVRDELDGKHDYRDHELIQDRYSLRCLPQYLGPIVDGISQIAKQIEIEINSVTDNPLIDVDNQASYHGGNFLGQYVGMGMDHLRYYIGLLAKHLDVQIALLASPEFSNGLPPSLLGNRERKVNMGLKGLQICGNSIMPLLTFYGNSIADRFPTHAEQFNQNINSQGYTSATLARRSVDIFQNYVAIALMFGVQAVDLRTYKKTGHYDARACLSPATERLYSAVRHVVGQKPTSDRPYIWNDNEQGLDEHIARISADIAAGGVIVQAVQDILPCLH

SEQ ID NO: 143 - protein, 567 aa, synthetic construct
MKTLSQAQSKTSSQQFSFTGNSSANVIIGNQKLTINDVARVARNGTLVSLTNNTDILQGIQASCDYINNAVESGEPIYGVTSGFGGMANVAISREQASELQENAVWHLKTGAGNKLPLADVRAAMLLRANSHMRGASGIRLELIKRMEIFLNAGVTPYVYEFGSIGASGDLVPLSYITGSLIGLDPSFKVDFNGKEMDAPTALRQLNLSPLTLLPKEALAMINGTSVMTGIAANCVYDTQILTAIAMGVHALDIQALNGTNQSFHPFIHNSKPHPGQLWAADQMISLLANSQLVRDELDGKHDYRDHELIQDRYSLRCLPQYLGPIVDGISQIAKQIEIEINSVTDNPLIDVDNQASYHGGNFLGQYVGMGMDHLRYYIGLLAKHLDVQIALLASPEFSNGLPPSLLGNRERKVNMGLKGLQICGNSIMPLLTFYGNSIADRFPTHAEQFNQNINSQGYTSATLARRSVDIFQNYVAIALMFGVQAVDLRTYKKTGHYDARACLSPATERLYSAVRHVVGQKPTSDRPYIWNDNEQGLDEHIARISADIAAGGVIVQAVQDILPCLH

SEQ ID NO: 144 - protein, 567 aa, synthetic construct
MKTLSQAQSKTSSQQFSFTGNSSANVIIGNQKLTINDVARVARNGTLVSLTNNTDILQGIQASCDYINNAVESGEPIYGVTSGFGGMANVAISREQASELQENVVWFMKTGAGNKLPLADVRAAMLLRANSHMRGASGIRLELIKRMEIFLNAGVTPYVYEFGSIGASGDLVPLSYITGSLIGLDPSFKVDFNGKEMDAPTALRQLNLSPLTLLPKEGLAMLNGTSVMTGIAANCVYDTQILTAIAMGVHALDIQALNGTNQSFHPFIHNSKPHPGQLWAADQMISLLANSQLVRDELDGKHDYRDHELIQDRYSLRCLPQYLGPIVDGISQIAKQIEIEINSVTDNPLIDVDNQASYHGGNFLGQYVGMGMDHLRYYIGLLAKHLDVQIALLASPEFSNGLPPSLLGNRERKVNMGLKGLQICGNSIMPLLTFYGNSIADRFPTHAEQFNQNINSQGYTSATLARRSVDIFQNYVAIALMFGVQAVDLRTYKKTGHYDARACLSPATERLYSAVRHVVGQKPTSDRPYIWNDNEQGLDEHIARISADIAAGGVIVQAVQDILPCLH

SEQ ID NO: 145 - protein, 567 aa, synthetic construct
MKTLSQAQSKTSSQQFSFTGNSSANVIIGNQKLTINDVARVARNGTLVSLTNNTDILQGIQASCDYINNAVESGEPIYGVTSGFGGMANVAISREQASELQENAVWHLKTGAGNKLPLADVRAAMLLRANSHMRGASGIRLELIKRMEIFLNAGVTPYVYEFGSIGASGDLVPLSYITGSLIGLDPSFKVDFNGKEMDAPTALRQLNLSPLTLLPKEGLAMVNGTSVMTGIAANCVYDTQILTAIAMGVHALDIQALNGTNQSFHPFIHNSKPHPGQLWAADQMISLLANSQLVRDELDGKHDYRDHELIQDRYSLRCLPQYLGPIVDGISQIAKQIEIEINSVTDNPLIDVDNQASYHGGNFLGQYVGMGMDHLRYYIGLLAKHLDVQIALLASPEFSNGLPPSLLGNRERKVNMGLKGLQICGNSIMPLLTFYGNSIADRFPTHAEQFNQNINSQGYTSATLARRSVDIFQNYVAIALMFGVQAVDLRTYKKTGHYDARACLSPATERLYSAVRHVVGQKPTSDRPYIWNDNEQGLDEHIARISADIAAGGVIVQAVQDILPCLH

SEQ ID NO: 146 - protein, 567 aa, synthetic construct
MKTLSQAQSKTSSQQFSFTGNSSANVIIGNQKLTINDVARVARNGTLVSLTNNTDILQGIQASCDYINNAVESGEPIYGVTSGFGGMANVAISREQASELQHNLVWYHKTGAGNKLPLADVRAAMLLRANSHMRGASGIRLELIKRMEIFLNAGVTPYVYEFGSIGASGDLVPLSYITGSLIGLDPSFKVDFNGKEMDAPTALRQLNLSPLTLLPKEAIAMINGTSVMTGIAANCVYDTQILTAIAMGVHALDIQALNGTNQSFHPFIHNSKPHPGQLWAADQMISLLANSQLVRDELDGKHDYRDHELIQDRYSLRCLPQYLGPIVDGISQIAKQIEIEINSVTDNPLIDVDNQASYHGGNFLGQYVGMGMDHLRYYIGLLAKHLDVQIALLASPEFSNGLPPSLLGNRERKVNMGLKGLQICGNSIMPLLTFYGNSIADRFPTHAEQFNQNINSQGYTSATLARRSVDIFQNYVAIALMFGVQAVDLRTYKKTGHYDARACLSPATERLYSAVRHVVGQKPTSDRPYIWNDNEQGLDEHIARISADIAAGGVIVQAVQDILPCLH

SEQ ID NO: 147 - protein, 567 aa, synthetic construct
MKTLSQAQSKTSSQQFSFTGNSSANVIIGNQKLTINDVARVARNGTLVSLTNNTDILQGIQASCDYINNAVESGEPIYGVTSGFGGMANVAISREQASELQENLVWSVKTGAGNKLPLADVRAAMLLRANSHMRGASGIRLELIKRMEIFLNAGVTPYVYEFGSIGASGDLVPLSYITGSLIGLDPSFKVDFNGKEMDAPTALRQLNLSPLTLLPKEGLAMLNGTSVMTGIAANCVYDTQILTAIAMGVHALDIQALNGTNQSFHPFIHNSKPHPGQLWAADQMISLLANSQLVRDELDGKHDYRDHELIQDRYSLRCLPQYLGPIVDGISQIAKQIEIEINSVTDNPLIDVDNQASYHGGNFLGQYVGMGMDHLRYYIGLLAKHLDVQIALLASPEFSNGLPPSLLGNRERKVNMGLKGLQICGNSIMPLLTFYGNSIADRFPTHAEQFNQNINSQGYTSATLARRSVDIFQNYVAIALMFGVQAVDLRTYKKTGHYDARACLSPATERLYSAVRHVVGQKPTSDRPYIWNDNEQGLDEHIARISADIAAGGVIVQAVQDILPCLH

SEQ ID NO: 148 - protein, 567 aa, synthetic construct
MKTLSQAQSKTSSQQFSFTGNSSANVIIGNQKLTINDVARVARNGTLVSLTNNTDILQGIQASCDYINNAVESGEPIYGVTSGFGGMANVAISREQASELQHNLVWFMKTGAGNKLPLADVRAAMLLRANSHMRGASGIRLELIKRMEIFLNAGVTPYVYEFGSIGASGDLVPLSYITGSLIGLDPSFKVDFNGKEMDAPTALRQLNLSPLTLLPKEGIAMVNGTSVMTGIAANCVYDTQILTAIAMGVHALDIQALNGTNQSFHPFIHNSKPHPGQLWAADQMISLLANSQLVRDELDGKHDYRDHELIQDRYSLRCLPQYLGPIVDGISQIAKQIEIEINSVTDNPLIDVDNQASYHGGNFLGQYVGMGMDHLRYYIGLLAKHLDVQIALLASPEFSNGLPPSLLGNRERKVNMGLKGLQICGNSIMPLLTFYGNSIADRFPTHAEQFNQNINSQGYTSATLARRSVDIFQNYVAIALMFGVQAVDLRTYKKTGHYDARACLSPATERLYSAVRHVVGQKPTSDRPYIWNDNEQGLDEHIARISADIAAGGVIVQAVQDILPCLH

SEQ ID NO: 149 - protein, 567 aa, synthetic construct
MKTLSQAQSKTSSQQFSFTGNSSANVIIGNQKLTINDVARVARNGTLVSLTNNTDILQGIQASCDYINNAVESGEPIYGVTSGFGGMANVAISREQASELQSNMVWSHKTGAGNKLPLADVRAAMLLRANSHMRGASGIRLELIKRMEIFLNAGVTPYVYEFGSIGASGDLVPLSYITGSLIGLDPSFKVDFNGKEMDAPTALRQLNLSPLTLLPKEAIAMVNGTSVMTGIAANCVYDTQILTAIAMGVHALDIQALNGTNQSFHPFIHNSKPHPGQLWAADQMISLLANSQLVRDELDGKHDYRDHELIQDRYSLRCLPQYLGPIVDGISQIAKQIEIEINSVTDNPLIDVDNQASYHGGNFLGQYVGMGMDHLRYYIGLLAKHLDVQIALLASPEFSNGLPPSLLGNRERKVNMGLKGLQICGNSIMPLLTFYGNSIADRFPTHAEQFNQNINSQGYTSATLARRSVDIFQNYVAIALMFGVQAVDLRTYKKTGHYDARACLSPATERLYSAVRHVVGQKPTSDRPYIWNDNEQGLDEHIARISADIAAGGVIVQAVQDILPCLH

SEQ ID NO: 150 - protein, 567 aa, synthetic construct
MKTLSQAQSKTSSQQFSFTGNSSANVIIGNQKLTINDVARVARNGTLVSLTNNTDILQGIQASCDYINNAVESGEPIYGVTSGFGGMANVAISREQASELQHNIVWHTKTGAGNKLPLADVRAAMLLRANSHMRGASGIRLELIKRMEIFLNAGVTPYVYEFGSIGASGDLVPLSYITGSLIGLDPSFKVDFNGKEMDAPTALRQLNLSPLTLLPKEGLAMTNGTSVMTGIAANCVYDTQILTAIAMGVHALDIQALNGTNQSFHPFIHNSKPHPGQLWAADQMISLLANSQLVRDELDGKHDYRDHELIQDRYSLRCLPQYLGPIVDGISQIAKQIEIEINSVTDNPLIDVDNQASYHGGNFLGQYVGMGMDHLRYYIGLLAKHLDVQIALLASPEFSNGLPPSLLGNRERKVNMGLKGLQICGNSIMPLLTFYGNSIADRFPTHAEQFNQNINSQGYTSATLARRSVDIFQNYVAIALMFGVQAVDLRTYKKTGHYDARACLSPATERLYSAVRHVVGQKPTSDRPYIWNDNEQGLDEHIARISADIAAGGVIVQAVQDILPCLH

SEQ ID NO: 151 - protein, 567 aa, synthetic construct
MKTLSQAQSKTSSQQFSFTGNSSANVIIGNQKLTINDVARVARNGTLVSLTNNTDILQGIQASCDYINNAVESGEPIYGVTSGFGGMANVAISREQASELQENLVWSLKTGAGNKLPLADVRAAMLLRANSHMRGASGIRLELIKRMEIFLNAGVTPYVYEFGSIGASGDLVPLSYITGSLIGLDPSFKVDFNGKEMDAPTALRQLNLSPLTLLPKEALAMNNGTSVMTGIAANCVYDTQILTAIAMGVHALDIQALNGTNQSFHPFIHNSKPHPGQLWAADQMISLLANSQLVRDELDGKHDYRDHELIQDRYSLRCLPQYLGPIVDGISQIAKQIEIEINSVTDNPLIDVDNQASYHGGNFLGQYVGMGMDHLRYYIGLLAKHLDVQIALLASPEFSNGLPPSLLGNRERKVNMGLKGLQICGNSIMPLLTFYGNSIADRFPTHAEQFNQNINSQGYTSATLARRSVDIFQNYVAIALMFGVQAVDLRTYKKTGHYDARACLSPATERLYSAVRHVVGQKPTSDRPYIWNDNEQGLDEHIARISADIAAGGVIVQAVQDILPCLH

SEQ ID NO: 152 - protein, 567 aa, synthetic construct
MKTLSQAQSKTSSQQFSFTGNSSANVIIGNQKLTINDVARVARNGTLVSLTNNTDILQGIQASCDYINNAVESGEPIYGVTSGFGGMANVAISREQASELQHNVVWYHKTGAGNKLPLADVRAAMLLRANSHMRGASGIRLELIKRMEIFLNAGVTPYVYEFGSIGASGDLVPLSYITGSLIGLDPSFKVDFNGKEMDAPTALRQLNLSPLTLLPKEGIAMVNGTSVMTGIAANCVYDTQILTAIAMGVHALDIQALNGTNQSFHPFIHNSKPHPGQLWAADQMISLLANSQLVRDELDGKHDYRDHELIQDRYSLRCLPQYLGPIVDGISQIAKQIEIEINSVTDNPLIDVDNQASYHGGNFLGQYVGMGMDHLRYYIGLLAKHLDVQIALLASPEFSNGLPPSLLGNRERKVNMGLKGLQICGNSIMPLLTFYGNSIADRFPTHAEQFNQNINSQGYTSATLARRSVDIFQNYVAIALMFGVQAVDLRTYKKTGHYDARACLSPATERLYSAVRHVVGQKPTSDRPYIWNDNEQGLDEHIARISADIAAGGVIVQAVQDILPCLH

SEQ ID NO: 153 - protein, 567 aa, synthetic construct
MKTLSQAQSKTSSQQFSFTGNSSANVIIGNQKLTINDVARVARNGTLVSLTNNTDILQGIQASCDYINNAVESGEPIYGVTSGFGGMANVAISREQASELQENLVWYMKTGAGNKLPLADVRAAMLLRANSHMRGASGIRLELIKRMEIFLNAGVTPYVYEFGSIGASGDLVPLSYITGSLIGLDPSFKVDFNGKEMDAPTALRQLNLSPLTLLPKEGIAMVNGTSVMTGIAANCVYDTQILTAIAMGVHALDIQALNGTNQSFHPFIHNSKPHPGQLWAADQMISLLANSQLVRDELDGKHDYRDHELIQDRYSLRCLPQYLGPIVDGISQIAKQIEIEINSVTDNPLIDVDNQASYHGGNFLGQYVGMGMDHLRYYIGLLAKHLDVQIALLASPEFSNGLPPSLLGNRERKVNMGLKGLQICGNSIMPLLTFYGNSIADRFPTHAEQFNQNINSQGYTSATLARRSVDIFQNYVAIALMFGVQAVDLRTYKKTGHYDARACLSPATERLYSAVRHVVGQKPTSDRPYIWNDNEQGLDEHIARISADIAAGGVIVQAVQDILPCLH

SEQ ID NO: 154 - protein, 567 aa, synthetic construct
MKTLSQAQSKTSSQQFSFTGNSSANVIIGNQKLTINDVARVARNGTLVSLTNNTDILQGIQASCDYINNAVESGEPIYGVTSGFGGMANVAISREQASELQHNIVWHLKTGAGNKLPLADVRAAMLLRANSHMRGASGIRLELIKRMEIFLNAGVTPYVYEFGSIGASGDLVPLSYITGSLIGLDPSFKVDFNGKEMDAPTALRQLNLSPLTLLPKEGIAMVNGTSVMTGIAANCVYDTQILTAIAMGVHALDIQALNGTNQSFHPFIHNSKPHPGQLWAADQMISLLANSQLVRDELDGKHDYRDHELIQDRYSLRCLPQYLGPIVDGISQIAKQIEIEINSVTDNPLIDVDNQASYHGGNFLGQYVGMGMDHLRYYIGLLAKHLDVQIALLASPEFSNGLPPSLLGNRERKVNMGLKGLQICGNSIMPLLTFYGNSIADRFPTHAEQFNQNINSQGYTSATLARRSVDIFQNYVAIALMFGVQAVDLRTYKKTGHYDARACLSPATERLYSAVRHVVGQKPTSDRPYIWNDNEQGLDEHIARISADIAAGGVIVQAVQDILPCLH

SEQ ID NO: 155 - protein, 567 aa, synthetic construct
MKTLSQAQSKTSSQQFSFTGNSSANVIIGNQKLTINDVARVARNGTLVSLTNNTDILQGIQASCDYINNAVESGEPIYGVTSGFGGMANVAISREQASELQKNAVWHVKTGAGNKLPLADVRAAMLLRANSHMRGASGIRLELIKRMEIFLNAGVTPYVYEFGSIGASGDLVPLSYITGSLIGLDPSFKVDFNGKEMDAPTALRQLNLSPLTLLPKEALAMMNGTSVMTGIAANCVYDTQILTAIAMGVHALDIQALNGTNQSFHPFIHNSKPHPGQLWAADQMISLLANSQLVRDELDGKHDYRDHELIQDRYSLRCLPQYLGPIVDGISQIAKQIEIEINSVTDNPLIDVDNQASYHGGNFLGQYVGMGMDHLRYYIGLLAKHLDVQIALLASPEFSNGLPPSLLGNRERKVNMGLKGLQICGNSIMPLLTFYGNSIADRFPTHAEQFNQNINSQGYTSATLARRSVDIFQNYVAIALMFGVQAVDLRTYKKTGHYDARACLSPATERLYSAVRHVVGQKPTSDRPYIWNDNEQGLDEHIARISADIAAGGVIVQAVQDILPCLH

SEQ ID NO: 156 - protein, 567 aa, synthetic construct
MKTLSQAQSKTSSQQFSFTGNSSANVIIGNQKLTINDVARVARNGTLVSLTNNTDILQGIQASCDYINNAVESGEPIYGVTSGFGGMANVAISREQASELQKNMVWHLKTGAGNKLPLADVRAAMLLRANSHMRGASGIRLELIKRMEIFLNAGVTPYVYEFGSIGASGDLVPLSYITGSLIGLDPSFKVDFNGKEMDAPTALRQLNLSPLTLLPKEALAMTNGTSVMTGIAANCVYDTQILTAIAMGVHALDIQALNGTNQSFHPFIHNSKPHPGQLWAADQMISLLANSQLVRDELDGKHDYRDHELIQDRYSLRCLPQYLGPIVDGISQIAKQIEIEINSVTDNPLIDVDNQASYHGGNFLGQYVGMGMDHLRYYIGLLAKHLDVQIALLASPEFSNGLPPSLLGNRERKVNMGLKGLQICGNSIMPLLTFYGNSIADRFPTHAEQFNQNINSQGYTSATLARRSVDIFQNYVAIALMFGVQAVDLRTYKKTGHYDARACLSPATERLYSAVRHVVGQKPTSDRPYIWNDNEQGLDEHIARISADIAAGGVIVQAVQDILPCLH

SEQ ID NO: 157 - protein, 567 aa, synthetic construct
MKTLSQAQSKTSSQQFSFTGNSSANVIIGNQKLTINDVARVARNGTLVSLTNNTDILQGIQASCDYINNAVESGEPIYGVTSGFGGMANVAISREQASELQSNLVWHHKTGAGNKLPLADVRAAMLLRANSHMRGASGIRLELIKRMEIFLNAGVTPYVYEFGSIGASGDLVPLSYITGSLIGLDPSFKVDFNGKEMDAPTALRQLNLSPLTLLPKEGLAMVNGTSVMTGIAANCVYDTQILTAIAMGVHALDIQALNGTNQSFHPFIHNSKPHPGQLWAADQMISLLANSQLVRDELDGKHDYRDHELIQDRYSLRCLPQYLGPIVDGISQIAKQIEIEINSVTDNPLIDVDNQASYHGGNFLGQYVGMGMDHLRYYIGLLAKHLDVQIALLASPEFSNGLPPSLLGNRERKVNMGLKGLQICGNSIMPLLTFYGNSIADRFPTHAEQFNQNINSQGYTSATLARRSVDIFQNYVAIALMFGVQAVDLRTYKKTGHYDARACLSPATERLYSAVRHVVGQKPTSDRPYIWNDNEQGLDEHIARISADIAAGGVIVQAVQDILPCLH

SEQ ID NO: 158 - protein, 567 aa, synthetic construct
MKTLSQAQSKTSSQQFSFTGNSSANVIIGNQKLTINDVARVARNGTLVSLTNNTDILQGIQASCDYINNAVESGEPIYGVTSGFGGMANVAISREQASELQTNAVWFMKTGAGNKLPLADVRAAMLLRANSHMRGASGIRLELIKRMEIFLNAGVTPYVYEFGSIGASGDLVPLSYITGSLIGLDPSFKVDFNGKEMDAPTALRQLNLSPLTLLPKEALAMMNGTSVMTGIAANCVYDTQILTAIAMGVHALDIQALNGTNQSFHPFIHNSKPHPGQLWAADQMISLLANSQLVRDELDGKHDYRDHELIQDRYSLRCLPQYLGPIVDGISQIAKQIEIEINSVTDNPLIDVDNQASYHGGNFLGQYVGMGMDHLRYYIGLLAKHLDVQIALLASPEFSNGLPPSLLGNRERKVNMGLKGLQICGNSIMPLLTFYGNSIADRFPTHAEQFNQNINSQGYTSATLARRSVDIFQNYVAIALMFGVQAVDLRTYKKTGHYDARACLSPATERLYSAVRHVVGQKPTSDRPYIWNDNEQGLDEHIARISADIAAGGVIVQAVQDILPCLH

SEQ ID NO: 159 - protein, 567 aa, synthetic construct
MKTLSQAQSKTSSQQFSFTGNSSANVIIGNQKLTINDVARVARNGTLVSLTNNTDILQGIQASCDYINNAVESGEPIYGVTSGFGGMANVAISREQASELQTNVVWFMKTGAGNKLPLADVRAAMLLRANSHMRGASGIRLELIKRMEIFLNAGVTPYVYEFGSIGASGDLVPLSYITGSLIGLDPSFKVDFNGKEMDAPTALRQLNLSPLTLLPKEGLAMMNGTSVMTGIAANCVYDTQILTAIAMGVHALDIQALNGTNQSFHPFIHNSKPHPGQLWAADQMISLLANSQLVRDELDGKHDYRDHELIQDRYSLRCLPQYLGPIVDGISQIAKQIEIEINSVTDNPLIDVDNQASYHGGNFLGQYVGMGMDHLRYYIGLLAKHLDVQIALLASPEFSNGLPPSLLGNRERKVNMGLKGLQICGNSIMPLLTFYGNSIADRFPTHAEQFNQNINSQGYTSATLARRSVDIFQNYVAIALMFGVQAVDLRTYKKTGHYDARACLSPATERLYSAVRHVVGQKPTSDRPYIWNDNEQGLDEHIARISADIAAGGVIVQAVQDILPCLH

SEQ ID NO: 160 - protein, 567 aa, synthetic construct
MKTLSQAQSKTSSQQFSFTGNSSANVIIGNQKLTINDVARVARNGTLVSLTNNTDILQGIQASCDYINNAVESGEPIYGVTSGFGGMANVAISREQASELQHNMVWFHKTGAGNKLPLADVRAAMLLRANSHMRGASGIRLELIKRMEIFLNAGVTPYVYEFGSIGASGDLVPLSYITGSLIGLDPSFKVDFNGKEMDAPTALRQLNLSPLTLLPKEAIAMLNGTSVMTGIAANCVYDTQILTAIAMGVHALDIQALNGTNQSFHPFIHNSKPHPGQLWAADQMISLLANSQLVRDELDGKHDYRDHELIQDRYSLRCLPQYLGPIVDGISQIAKQIEIEINSVTDNPLIDVDNQASYHGGNFLGQYVGMGMDHLRYYIGLLAKHLDVQIALLASPEFSNGLPPSLLGNRERKVNMGLKGLQICGNSIMPLLTFYGNSIADRFPTHAEQFNQNINSQGYTSATLARRSVDIFQNYVAIALMFGVQAVDLRTYKKTGHYDARACLSPATERLYSAVRHVVGQKPTSDRPYIWNDNEQGLDEHIARISADIAAGGVIVQAVQDILPCLH

SEQ ID NO: 161 - protein, 567 aa, synthetic construct
MKTLSQAQSKTSSQQFSFTGNSSANVIIGNQKLTINDVARVARNGTLVSLTNNTDILQGIQASCDYINNAVESGEPIYGVTSGFGGMANVAISREQASELQHNLVWFMKTGAGNKLPLADVRAAMLLRANSHMRGASGIRLELIKRMEIFLNAGVTPYVYEFGSIGASGDLVPLSYITGSLIGLDPSFKVDFNGKEMDAPTALRQLNLSPLTLLPKEALAMTNGTSVMTGIAANCVYDTQILTAIAMGVHALDIQALNGTNQSFHPFIHNSKPHPGQLWAADQMISLLANSQLVRDELDGKHDYRDHELIQDRYSLRCLPQYLGPIVDGISQIAKQIEIEINSVTDNPLIDVDNQASYHGGNFLGQYVGMGMDHLRYYIGLLAKHLDVQIALLASPEFSNGLPPSLLGNRERKVNMGLKGLQICGNSIMPLLTFYGNSIADRFPTHAEQFNQNINSQGYTSATLARRSVDIFQNYVAIALMFGVQAVDLRTYKKTGHYDARACLSPATERLYSAVRHVVGQKPTSDRPYIWNDNEQGLDEHIARISADIAAGGVIVQAVQDILPCLH

SEQ ID NO: 162 - protein, 567 aa, synthetic construct
MKTLSQAQSKTSSQQFSFTGNSSANVIIGNQKLTINDVARVARNGTLVSLTNNTDILQGIQASCDYINNAVESGEPIYGVTSGFGGMANVAISREQASELQHNIVWHLKTGAGNKLPLADVRAAMLLRANSHMRGASGIRLELIKRMEIFLNAGVTPYVYEFGSIGASGDLVPLSYITGSLIGLDPSFKVDFNGKEMDAPTALRQLNLSPLTLLPKEGLAMINGTSVMTGIAANCVYDTQILTAIAMGVHALDIQALNGTNQSFHPFIHNSKPHPGQLWAADQMISLLANSQLVRDELDGKHDYRDHELIQDRYSLRCLPQYLGPIVDGISQIAKQIEIEINSVTDNPLIDVDNQASYHGGNFLGQYVGMGMDHLRYYIGLLAKHLDVQIALLASPEFSNGLPPSLLGNRERKVNMGLKGLQICGNSIMPLLTFYGNSIADRFPTHAEQFNQNINSQGYTSATLARRSVDIFQNYVAIALMFGVQAVDLRTYKKTGHYDARACLSPATERLYSAVRHVVGQKPTSDRPYIWNDNEQGLDEHIARISADIAAGGVIVQAVQDILPCLH

SEQ ID NO: 163 - protein, 567 aa, synthetic construct
MKTLSQAQSKTSSQQFSFTGNSSANVIIGNQKLTINDVARVARNGTLVSLTNNTDILQGIQASCDYINNAVESGEPIYGVTSGFGGMANVAISREQASELQENLVWHMKTGAGNKLPLADVRAAMLLRANSHMRGASGIRLELIKRMEIFLNAGVTPYVYEFGSIGASGDLVPLSYITGSLIGLDPSFKVDFNGKEMDAPTALRQLNLSPLTLLPKEGIAMVNGTSVMTGIAANCVYDTQILTAIAMGVHALDIQALNGTNQSFHPFIHNSKPHPGQLWAADQMISLLANSQLVRDELDGKHDYRDHELIQDRYSLRCLPQYLGPIVDGISQIAKQIEIEINSVTDNPLIDVDNQASYHGGNFLGQYVGMGMDHLRYYIGLLAKHLDVQIALLASPEFSNGLPPSLLGNRERKVNMGLKGLQICGNSIMPLLTFYGNSIADRFPTHAEQFNQNINSQGYTSATLARRSVDIFQNYVAIALMFGVQAVDLRTYKKTGHYDARACLSPATERLYSAVRHVVGQKPTSDRPYIWNDNEQGLDEHIARISADIAAGGVIVQAVQDILPCLH

SEQ ID NO: 164 - protein, 567 aa, synthetic construct
MKTLSQAQSKTSSQQFSFTGNSSANVIIGNQKLTINDVARVARNGTLVSLTNNTDILQGIQASCDYINNAVESGEPIYGVTSGFGGMANVAISREQASELQTNLVWSTKTGAGNKLPLADVRAAMLLRANSHMRGASGIRLELIKRMEIFLNAGVTPYVYEFGSIGASGDLVPLSYITGSLIGLDPSFKVDFNGKEMDAPTALRQLNLSPLTLLPKEAIAMINGTSVMTGIAANCVYDTQILTAIAMGVHALDIQALNGTNQSFHPFIHNSKPHPGQLWAADQMISLLANSQLVRDELDGKHDYRDHELIQDRYSLRCLPQYLGPIVDGISQIAKQIEIEINSVTDNPLIDVDNQASYHGGNFLGQYVGMGMDHLRYYIGLLAKHLDVQIALLASPEFSNGLPPSLLGNRERKVNMGLKGLQICGNSIMPLLTFYGNSIADRFPTHAEQFNQNINSQGYTSATLARRSVDIFQNYVAIALMFGVQAVDLRTYKKTGHYDARACLSPATERLYSAVRHVVGQKPTSDRPYIWNDNEQGLDEHIARISADIAAGGVIVQAVQDILPCLH

SEQ ID NO: 165 - protein, 567 aa, synthetic construct
MKTLSQAQSKTSSQQFSFTGNSSANVIIGNQKLTINDVARVARNGTLVSLTNNTDILQGIQASCDYINNAVESGEPIYGVTSGFGGMANVAISREQASELQENVVWYHKTGAGNKLPLADVRAAMLLRANSHMRGASGIRLELIKRMEIFLNAGVTPYVYEFGSIGASGDLVPLSYITGSLIGLDPSFKVDFNGKEMDAPTALRQLNLSPLTLLPKEGIAMLNGTSVMTGIAANCVYDTQILTAIAMGVHALDIQALNGTNQSFHPFIHNSKPHPGQLWAADQMISLLANSQLVRDELDGKHDYRDHELIQDRYSLRCLPQYLGPIVDGISQIAKQIEIEINSVTDNPLIDVDNQASYHGGNFLGQYVGMGMDHLRYYIGLLAKHLDVQIALLASPEFSNGLPPSLLGNRERKVNMGLKGLQICGNSIMPLLTFYGNSIADRFPTHAEQFNQNINSQGYTSATLARRSVDIFQNYVAIALMFGVQAVDLRTYKKTGHYDARACLSPATERLYSAVRHVVGQKPTSDRPYIWNDNEQGLDEHIARISADIAAGGVIVQAVQDILPCLH

SEQ ID NO: 166 - protein, 567 aa, synthetic construct
MKTLSQAQSKTSSQQFSFTGNSSANVIIGNQKLTINDVARVARNGTLVSLTNNTDILQGIQASCDYINNAVESGEPIYGVTSGFGGMANVAISREQASELQKNVVWHLKTGAGNKLPLADVRAAMLLRANSHMRGASGIRLELIKRMEIFLNAGVTPYVYEFGSIGASGDLVPLSYITGSLIGLDPSFKVDFNGKEMDAPTALRQLNLSPLTLLPKEGLAMINGTSVMTGIAANCVYDTQILTAIAMGVHALDIQALNGTNQSFHPFIHNSKPHPGQLWAADQMISLLANSQLVRDELDGKHDYRDHELIQDRYSLRCLPQYLGPIVDGISQIAKQIEIEINSVTDNPLIDVDNQASYHGGNFLGQYVGMGMDHLRYYIGLLAKHLDVQIALLASPEFSNGLPPSLLGNRERKVNMGLKGLQICGNSIMPLLTFYGNSIADRFPTHAEQFNQNINSQGYTSATLARRSVDIFQNYVAIALMFGVQAVDLRTYKKTGHYDARACLSPATERLYSAVRHVVGQKPTSDRPYIWNDNEQGLDEHIARISADIAAGGVIVQAVQDILPCLH

SEQ ID NO: 167 - protein, 567 aa, synthetic construct
MKTLSQAQSKTSSQQFSFTGNSSANVIIGNQKLTINDVARVARNGTLVSLTNNTDILQGIQASCDYINNAVESGEPIYGVTSGFGGMANVAISREQASELQHNMVWYHKTGAGNKLPLADVRAAMLLRANSHMRGASGIRLELIKRMEIFLNAGVTPYVYEFGSIGASGDLVPLSYITGSLIGLDPSFKVDFNGKEMDAPTALRQLNLSPLTLLPKEAIAMLNGTSVMTGIAANCVYDTQILTAIAMGVHALDIQALNGTNQSFHPFIHNSKPHPGQLWAADQMISLLANSQLVRDELDGKHDYRDHELIQDRYSLRCLPQYLGPIVDGISQIAKQIEIEINSVTDNPLIDVDNQASYHGGNFLGQYVGMGMDHLRYYIGLLAKHLDVQIALLASPEFSNGLPPSLLGNRERKVNMGLKGLQICGNSIMPLLTFYGNSIADRFPTHAEQFNQNINSQGYTSATLARRSVDIFQNYVAIALMFGVQAVDLRTYKKTGHYDARACLSPATERLYSAVRHVVGQKPTSDRPYIWNDNEQGLDEHIARISADIAAGGVIVQAVQDILPCLH

SEQ ID NO: 168 - protein, 567 aa, synthetic construct
MKTLSQAQSKTSSQQFSFTGNSSANVIIGNQKLTINDVARVARNGTLVSLTNNTDILQGIQASCDYINNAVESGEPIYGVTSGFGGMANVAISREQASELQENLVWYVKTGAGNKLPLADVRAAMLLRANSHMRGASGIRLELIKRMEIFLNAGVTPYVYEFGSIGASGDLVPLSYITGSLIGLDPSFKVDFNGKEMDAPTALRQLNLSPLTLLPKESLAMNNGTSVMTGIAANCVYDTQILTAIAMGVHALDIQALNGTNQSFHPFIHNSKPHPGQLWAADQMISLLANSQLVRDELDGKHDYRDHELIQDRYSLRCLPQYLGPIVDGISQIAKQIEIEINSVTDNPLIDVDNQASYHGGNFLGQYVGMGMDHLRYYIGLLAKHLDVQIALLASPEFSNGLPPSLLGNRERKVNMGLKGLQICGNSIMPLLTFYGNSIADRFPTHAEQFNQNINSQGYTSATLARRSVDIFQNYVAIALMFGVQAVDLRTYKKTGHYDARACLSPATERLYSAVRHVVGQKPTSDRPYIWNDNEQGLDEHIARISADIAAGGVIVQAVQDILPCLH

SEQ ID NO: 169 - protein, 567 aa, synthetic construct
MKTLSQAQSKTSSQQFSFTGNSSANVIIGNQKLTINDVARVARNGTLVSLTNNTDILQGIQASCDYINNAVESGEPIYGVTSGFGGMANVAISREQASELQENVVWFHKTGAGNKLPLADVRAAMLLRANSHMRGASGIRLELIKRMEIFLNAGVTPYVYEFGSIGASGDLVPLSYITGSLIGLDPSFKVDFNGKEMDAPTALRQLNLSPLTLLPKEGIAMINGTSVMTGIAANCVYDTQILTAIAMGVHALDIQALNGTNQSFHPFIHNSKPHPGQLWAADQMISLLANSQLVRDELDGKHDYRDHELIQDRYSLRCLPQYLGPIVDGISQIAKQIEIEINSVTDNPLIDVDNQASYHGGNFLGQYVGMGMDHLRYYIGLLAKHLDVQIALLASPEFSNGLPPSLLGNRERKVNMGLKGLQICGNSIMPLLTFYGNSIADRFPTHAEQFNQNINSQGYTSATLARRSVDIFQNYVAIALMFGVQAVDLRTYKKTGHYDARACLSPATERLYSAVRHVVGQKPTSDRPYIWNDNEQGLDEHIARISADIAAGGVIVQAVQDILPCLH

SEQ ID NO: 170 - protein, 567 aa, synthetic construct
MKTLSQAQSKTSSQQFSFTGNSSANVIIGNQKLTINDVARVARNGTLVSLTNNTDILQGIQASCDYINNAVESGEPIYGVTSGFGGMANVAISREQASELQTNAVWHTKTGAGNKLPLADVRAAMLLRANSHMRGASGIRLELIKRMEIFLNAGVTPYVYEFGSIGASGDLVPLSYITGSLIGLDPSFKVDFNGKEMDAPTALRQLNLSPLTLLPKEALAMINGTSVMTGIAANCVYDTQILTAIAMGVHALDIQALNGTNQSFHPFIHNSKPHPGQLWAADQMISLLANSQLVRDELDGKHDYRDHELIQDRYSLRCLPQYLGPIVDGISQIAKQIEIEINSVTDNPLIDVDNQASYHGGNFLGQYVGMGMDHLRYYIGLLAKHLDVQIALLASPEFSNGLPPSLLGNRERKVNMGLKGLQICGNSIMPLLTFYGNSIADRFPTHAEQFNQNINSQGYTSATLARRSVDIFQNYVAIALMFGVQAVDLRTYKKTGHYDARACLSPATERLYSAVRHVVGQKPTSDRPYIWNDNEQGLDEHIARISADIAAGGVIVQAVQDILPCLH

SEQ ID NO: 171 - protein, 567 aa, synthetic construct
MKTLSQAQSKTSSQQFSFTGNSSANVIIGNQKLTINDVARVARNGTLVSLTNNTDILQGIQASCDYINNAVESGEPIYGVTSGFGGMANVAISREQASELQENIVWHVKTGAGNKLPLADVRAAMLLRANSHMRGASGIRLELIKRMEIFLNAGVTPYVYEFGSIGASGDLVPLSYITGSLIGLDPSFKVDFNGKEMDAPTALRQLNLSPLTLLPKEGLAMINGTSVMTGIAANCVYDTQILTAIAMGVHALDIQALNGTNQSFHPFIHNSKPHPGQLWAADQMISLLANSQLVRDELDGKHDYRDHELIQDRYSLRCLPQYLGPIVDGISQIAKQIEIEINSVTDNPLIDVDNQASYHGGNFLGQYVGMGMDHLRYYIGLLAKHLDVQIALLASPEFSNGLPPSLLGNRERKVNMGLKGLQICGNSIMPLLTFYGNSIADRFPTHAEQFNQNINSQGYTSATLARRSVDIFQNYVAIALMFGVQAVDLRTYKKTGHYDARACLSPATERLYSAVRHVVGQKPTSDRPYIWNDNEQGLDEHIARISADIAAGGVIVQAVQDILPCLH

SEQ ID NO: 172 - protein, 567 aa, synthetic construct
MKTLSQAQSKTSSQQFSFTGNSSANVIIGNQKLTINDVARVARNGTLVSLTNNTDILQGIQASCDYINNAVESGEPIYGVTSGFGGMANVAISREQASELQTNVVWFHKTGAGNKLPLADVRAAMLLRANSHMRGASGIRLELIKRMEIFLNAGVTPYVYEFGSIGASGDLVPLSYITGSLIGLDPSFKVDFNGKEMDAPTALRQLNLSPLTLLPKEGIAMINGTSVMTGIAANCVYDTQILTAIAMGVHALDIQALNGTNQSFHPFIHNSKPHPGQLWAADQMISLLANSQLVRDELDGKHDYRDHELIQDRYSLRCLPQYLGPIVDGISQIAKQIEIEINSVTDNPLIDVDNQASYHGGNFLGQYVGMGMDHLRYYIGLLAKHLDVQIALLASPEFSNGLPPSLLGNRERKVNMGLKGLQICGNSIMPLLTFYGNSIADRFPTHAEQFNQNINSQGYTSATLARRSVDIFQNYVAIALMFGVQAVDLRTYKKTGHYDARACLSPATERLYSAVRHVVGQKPTSDRPYIWNDNEQGLDEHIARISADIAAGGVIVQAVQDILPCLH

SEQ ID NO: 173 - protein, 567 aa, synthetic construct
MKTLSQAQSKTSSQQFSFTGNSSANVIIGNQKLTINDVARVARNGTLVSLTNNTDILQGIQASCDYINNAVESGEPIYGVTSGFGGMANVAISREQASELQENVVWHLKTGAGNKLPLADVRAAMLLRANSHMRGASGIRLELIKRMEIFLNAGVTPYVYEFGSIGASGDLVPLSYITGSLIGLDPSFKVDFNGKEMDAPTALRQLNLSPLTLLPKEGLAMINGTSVMTGIAANCVYDTQILTAIAMGVHALDIQALNGTNQSFHPFIHNSKPHPGQLWAADQMISLLANSQLVRDELDGKHDYRDHELIQDRYSLRCLPQYLGPIVDGISQIAKQIEIEINSVTDNPLIDVDNQASYHGGNFLGQYVGMGMDHLRYYIGLLAKHLDVQIALLASPEFSNGLPPSLLGNRERKVNMGLKGLQICGNSIMPLLTFYGNSIADRFPTHAEQFNQNINSQGYTSATLARRSVDIFQNYVAIALMFGVQAVDLRTYKKTGHYDARACLSPATERLYSAVRHVVGQKPTSDRPYIWNDNEQGLDEHIARISADIAAGGVIVQAVQDILPCLH

SEQ ID NO: 174 - protein, 567 aa, synthetic construct
MKTLSQAQSKTSSQQFSFTGNSSANVIIGNQKLTINDVARVARNGTLVSLTNNTDILQGIQASCDYINNAVESGEPIYGVTSGFGGMANVAISREQASELQTNLVWFMKTGAGNKLPLADVRAAMLLRANSHMRGASGIRLELIKRMEIFLNAGVTPYVYEFGSIGASGDLVPLSYITGSLIGLDPSFKVDFNGKEMDAPTALRQLNLSPLTLLPKEAIAMVNGTSVMTGIAANCVYDTQILTAIAMGVHALDIQALNGTNQSFHPFIHNSKPHPGQLWAADQMISLLANSQLVRDELDGKHDYRDHELIQDRYSLRCLPQYLGPIVDGISQIAKQIEIEINSVTDNPLIDVDNQASYHGGNFLGQYVGMGMDHLRYYIGLLAKHLDVQIALLASPEFSNGLPPSLLGNRERKVNMGLKGLQICGNSIMPLLTFYGNSIADRFPTHAEQFNQNINSQGYTSATLARRSVDIFQNYVAIALMFGVQAVDLRTYKKTGHYDARACLSPATERLYSAVRHVVGQKPTSDRPYIWNDNEQGLDEHIARISADIAAGGVIVQAVQDILPCLH

SEQ ID NO: 175 - protein, 567 aa, synthetic construct
MKTLSQAQSKTSSQQFSFTGNSSANVIIGNQKLTINDVARVARNGTLVSLTNNTDILQGIQASCDYINNAVESGEPIYGVTSGFGGMANVAISREQASELQHNLVWFMKTGAGNKLPLADVRAAMLLRANSHMRGASGIRLELIKRMEIFLNAGVTPYVYEFGSIGASGDLVPLSYITGSLIGLDPSFKVDFNGKEMDAPTALRQLNLSPLTLLPKEAIAMLNGTSVMTGIAANCVYDTQILTAIAMGVHALDIQALNGTNQSFHPFIHNSKPHPGQLWAADQMISLLANSQLVRDELDGKHDYRDHELIQDRYSLRCLPQYLGPIVDGISQIAKQIEIEINSVTDNPLIDVDNQASYHGGNFLGQYVGMGMDHLRYYIGLLAKHLDVQIALLASPEFSNGLPPSLLGNRERKVNMGLKGLQICGNSIMPLLTFYGNSIADRFPTHAEQFNQNINSQGYTSATLARRSVDIFQNYVAIALMFGVQAVDLRTYKKTGHYDARACLSPATERLYSAVRHVVGQKPTSDRPYIWNDNEQGLDEHIARISADIAAGGVIVQAVQDILPCLH

SEQ ID NO: 176 - protein, 567 aa, synthetic construct
MKTLSQAQSKTSSQQFSFTGNSSANVIIGNQKLTINDVARVARNGTLVSLTNNTDILQGIQASCDYINNAVESGEPIYGVTSGFGGMANVAISREQASELQSNMVWHLKTGAGNKLPLADVRAAMLLRANSHMRGASGIRLELIKRMEIFLNAGVTPYVYEFGSIGASGDLVPLSYITGSLIGLDPSFKVDFNGKEMDAPTALRQLNLSPLTLLPKEGLAMTNGTSVMTGIAANCVYDTQILTAIAMGVHALDIQALNGTNQSFHPFIHNSKPHPGQLWAADQMISLLANSQLVRDELDGKHDYRDHELIQDRYSLRCLPQYLGPIVDGISQIAKQIEIEINSVTDNPLIDVDNQASYHGGNFLGQYVGMGMDHLRYYIGLLAKHLDVQIALLASPEFSNGLPPSLLGNRERKVNMGLKGLQICGNSIMPLLTFYGNSIADRFPTHAEQFNQNINSQGYTSATLARRSVDIFQNYVAIALMFGVQAVDLRTYKKTGHYDARACLSPATERLYSAVRHVVGQKPTSDRPYIWNDNEQGLDEHIARISADIAAGGVIVQAVQDILPCLH

SEQ ID NO: 177 - protein, 567 aa, synthetic construct
MKTLSQAQSKTSSQQFSFTGNSSANVIIGNQKLTINDVARVARNGTLVSLTNNTDILQGIQASCDYINNAVESGEPIYGVTSGFGGMANVAISREQASELQENVVWYHKTGAGNKLPLADVRAAMLLRANSHMRGASGIRLELIKRMEIFLNAGVTPYVYEFGSIGASGDLVPLSYITGSLIGLDPSFKVDFNGKEMDAPTALRQLNLSPLTLLPKEALAMINGTSVMTGIAANCVYDTQILTAIAMGVHALDIQALNGTNQSFHPFIHNSKPHPGQLWAADQMISLLANSQLVRDELDGKHDYRDHELIQDRYSLRCLPQYLGPIVDGISQIAKQIEIEINSVTDNPLIDVDNQASYHGGNFLGQYVGMGMDHLRYYIGLLAKHLDVQIALLASPEFSNGLPPSLLGNRERKVNMGLKGLQICGNSIMPLLTFYGNSIADRFPTHAEQFNQNINSQGYTSATLARRSVDIFQNYVAIALMFGVQAVDLRTYKKTGHYDARACLSPATERLYSAVRHVVGQKPTSDRPYIWNDNEQGLDEHIARISADIAAGGVIVQAVQDILPCLH

SEQ ID NO: 178 - protein, 567 aa, synthetic construct
MKTLSQAQSKTSSQQFSFTGNSSANVIIGNQKLTINDVARVARNGTLVSLTNNTDILQGIQASCDYINNAVESGEPIYGVTSGFGGMANVAISREQASELQENIVWSHKTGAGNKLPLADVRAAMLLRANSHMRGASGIRLELIKRMEIFLNAGVTPYVYEFGSIGASGDLVPLSYITGSLIGLDPSFKVDFNGKEMDAPTALRQLNLSPLTLLPKEGIAMMNGTSVMTGIAANCVYDTQILTAIAMGVHALDIQALNGTNQSFHPFIHNSKPHPGQLWAADQMISLLANSQLVRDELDGKHDYRDHELIQDRYSLRCLPQYLGPIVDGISQIAKQIEIEINSVTDNPLIDVDNQASYHGGNFLGQYVGMGMDHLRYYIGLLAKHLDVQIALLASPEFSNGLPPSLLGNRERKVNMGLKGLQICGNSIMPLLTFYGNSIADRFPTHAEQFNQNINSQGYTSATLARRSVDIFQNYVAIALMFGVQAVDLRTYKKTGHYDARACLSPATERLYSAVRHVVGQKPTSDRPYIWNDNEQGLDEHIARISADIAAGGVIVQAVQDILPCLH

SEQ ID NO: 179 - protein, 567 aa, synthetic construct
MKTLSQAQSKTSSQQFSFTGNSSANVIIGNQKLTINDVARVARNGTLVSLTNNTDILQGIQASCDYINNAVESGEPIYGVTSGFGGMANVAISREQASELQENMVWHLKTGAGNKLPLADVRAAMLLRANSHMRGASGIRLELIKRMEIFLNAGVTPYVYEFGSIGASGDLVPLSYITGSLIGLDPSFKVDFNGKEMDAPTALRQLNLSPLTLLPKEGLAMMNGTSVMTGIAANCVYDTQILTAIAMGVHALDIQALNGTNQSFHPFIHNSKPHPGQLWAADQMISLLANSQLVRDELDGKHDYRDHELIQDRYSLRCLPQYLGPIVDGISQIAKQIEIEINSVTDNPLIDVDNQASYHGGNFLGQYVGMGMDHLRYYIGLLAKHLDVQIALLASPEFSNGLPPSLLGNRERKVNMGLKGLQICGNSIMPLLTFYGNSIADRFPTHAEQFNQNINSQGYTSATLARRSVDIFQNYVAIALMFGVQAVDLRTYKKTGHYDARACLSPATERLYSAVRHVVGQKPTSDRPYIWNDNEQGLDEHIARISADIAAGGVIVQAVQDILPCLH

SEQ ID NO: 180 - protein, 567 aa, synthetic construct
MKTLSQAQSKTSSQQFSFTGNSSANVIIGNQKLTINDVARVARNGTLVSLTNNTDILQGIQASCDYINNAVESGEPIYGVTSGFGGMANVAISREQASELQTNIVWHTKTGAGNKLPLADVRAAMLLRANSHMRGASGIRLELIKRMEIFLNAGVTPYVYEFGSIGASGDLVPLSYITGSLIGLDPSFKVDFNGKEMDAPTALRQLNLSPLTLLPKEGIAMLNGTSVMTGIAANCVYDTQILTAIAMGVHALDIQALNGTNQSFHPFIHNSKPHPGQLWAADQMISLLANSQLVRDELDGKHDYRDHELIQDRYSLRCLPQYLGPIVDGISQIAKQIEIEINSVTDNPLIDVDNQASYHGGNFLGQYVGMGMDHLRYYIGLLAKHLDVQIALLASPEFSNGLPPSLLGNRERKVNMGLKGLQICGNSIMPLLTFYGNSIADRFPTHAEQFNQNINSQGYTSATLARRSVDIFQNYVAIALMFGVQAVDLRTYKKTGHYDARACLSPATERLYSAVRHVVGQKPTSDRPYIWNDNEQGLDEHIARISADIAAGGVIVQAVQDILPCLH

SEQ ID NO: 181 - protein, 567 aa, synthetic construct
MKTLSQAQSKTSSQQFSFTGNSSANVIIGNQKLTINDVARVARNGTLVSLTNNTDILQGIQASCDYINNAVESGEPIYGVTSGFGGMANVAISREQASELQTNLVWHMKTGAGNKLPLADVRAAMLLRANSHMRGASGIRLELIKRMEIFLNAGVTPYVYEFGSIGASGDLVPLSYITGSLIGLDPSFKVDFNGKEMDAPTALRQLNLSPLTLLPKEGLAMVNGTSVMTGIAANCVYDTQILTAIAMGVHALDIQALNGTNQSFHPFIHNSKPHPGQLWAADQMISLLANSQLVRDELDGKHDYRDHELIQDRYSLRCLPQYLGPIVDGISQIAKQIEIEINSVTDNPLIDVDNQASYHGGNFLGQYVGMGMDHLRYYIGLLAKHLDVQIALLASPEFSNGLPPSLLGNRERKVNMGLKGLQICGNSIMPLLTFYGNSIADRFPTHAEQFNQNINSQGYTSATLARRSVDIFQNYVAIALMFGVQAVDLRTYKKTGHYDARACLSPATERLYSAVRHVVGQKPTSDRPYIWNDNEQGLDEHIARISADIAAGGVIVQAVQDILPCLH

SEQ ID NO: 182 - protein, 567 aa, synthetic construct
MKTLSQAQSKTSSQQFSFTGNSSANVIIGNQKLTINDVARVARNGTLVSLTNNTDILQGIQASCDYINNAVESGEPIYGVTSGFGGMANVAISREQASELQKNLVWSHKTGAGNKLPLADVRAAMLLRANSHMRGASGIRLELIKRMEIFLNAGVTPYVYEFGSIGASGDLVPLSYITGSLIGLDPSFKVDFNGKEMDAPTALRQLNLSPLTLLPKESIAMMNGTSVMTGIAANCVYDTQILTAIAMGVHALDIQALNGTNQSFHPFIHNSKPHPGQLWAADQMISLLANSQLVRDELDGKHDYRDHELIQDRYSLRCLPQYLGPIVDGISQIAKQIEIEINSVTDNPLIDVDNQASYHGGNFLGQYVGMGMDHLRYYIGLLAKHLDVQIALLASPEFSNGLPPSLLGNRERKVNMGLKGLQICGNSIMPLLTFYGNSIADRFPTHAEQFNQNINSQGYTSATLARRSVDIFQNYVAIALMFGVQAVDLRTYKKTGHYDARACLSPATERLYSAVRHVVGQKPTSDRPYIWNDNEQGLDEHIARISADIAAGGVIVQAVQDILPCLH

SEQ ID NO: 183 - protein, 567 aa, synthetic construct
MKTLSQAQSKTSSQQFSFTGNSSANVIIGNQKLTINDVARVARNGTLVSLTNNTDILQGIQASCDYINNAVESGEPIYGVTSGFGGMANVAISREQASELQHNLVWSHKTGAGNKLPLADVRAAMLLRANSHMRGASGIRLELIKRMEIFLNAGVTPYVYEFGSIGASGDLVPLSYITGSLIGLDPSFKVDFNGKEMDAPTALRQLNLSPLTLLPKEALAMVNGTSVMTGIAANCVYDTQILTAIAMGVHALDIQALNGTNQSFHPFIHNSKPHPGQLWAADQMISLLANSQLVRDELDGKHDYRDHELIQDRYSLRCLPQYLGPIVDGISQIAKQIEIEINSVTDNPLIDVDNQASYHGGNFLGQYVGMGMDHLRYYIGLLAKHLDVQIALLASPEFSNGLPPSLLGNRERKVNMGLKGLQICGNSIMPLLTFYGNSIADRFPTHAEQFNQNINSQGYTSATLARRSVDIFQNYVAIALMFGVQAVDLRTYKKTGHYDARACLSPATERLYSAVRHVVGQKPTSDRPYIWNDNEQGLDEHIARISADIAAGGVIVQAVQDILPCLH

SEQ ID NO: 184 - protein, 567 aa, synthetic construct
MKTLSQAQSKTSSQQFSFTGNSSANVIIGNQKLTINDVARVARNGTLVSLTNNTDILQGIQASCDYINNAVESGEPIYGVTSGFGGMANVAISREQASELQENIVWHLKTGAGNKLPLADVRAAMLLRANSHMRGASGIRLELIKRMEIFLNAGVTPYVYEFGSIGASGDLVPLSYITGSLIGLDPSFKVDFNGKEMDAPTALRQLNLSPLTLLPKEGLAMVNGTSVMTGIAANCVYDTQILTAIAMGVHALDIQALNGTNQSFHPFIHNSKPHPGQLWAADQMISLLANSQLVRDELDGKHDYRDHELIQDRYSLRCLPQYLGPIVDGISQIAKQIEIEINSVTDNPLIDVDNQASYHGGNFLGQYVGMGMDHLRYYIGLLAKHLDVQIALLASPEFSNGLPPSLLGNRERKVNMGLKGLQICGNSIMPLLTFYGNSIADRFPTHAEQFNQNINSQGYTSATLARRSVDIFQNYVAIALMFGVQAVDLRTYKKTGHYDARACLSPATERLYSAVRHVVGQKPTSDRPYIWNDNEQGLDEHIARISADIAAGGVIVQAVQDILPCLH

SEQ ID NO: 185 - protein, 567 aa, synthetic construct
MKTLSQAQSKTSSQQFSFTGNSSANVIIGNQKLTINDVARVARNGTLVSLTNNTDILQGIQASCDYINNAVESGEPIYGVTSGFGGMANVAISREQASELQHNLVWHTKTGAGNKLPLADVRAAMLLRANSHMRGASGIRLELIKRMEIFLNAGVTPYVYEFGSIGASGDLVPLSYITGSLIGLDPSFKVDFNGKEMDAPTALRQLNLSPLTLLPKEAIAMLNGTSVMTGIAANCVYDTQILTAIAMGVHALDIQALNGTNQSFHPFIHNSKPHPGQLWAADQMISLLANSQLVRDELDGKHDYRDHELIQDRYSLRCLPQYLGPIVDGISQIAKQIEIEINSVTDNPLIDVDNQASYHGGNFLGQYVGMGMDHLRYYIGLLAKHLDVQIALLASPEFSNGLPPSLLGNRERKVNMGLKGLQICGNSIMPLLTFYGNSIADRFPTHAEQFNQNINSQGYTSATLARRSVDIFQNYVAIALMFGVQAVDLRTYKKTGHYDARACLSPATERLYSAVRHVVGQKPTSDRPYIWNDNEQGLDEHIARISADIAAGGVIVQAVQDILPCLH

SEQ ID NO: 186 - protein, 567 aa, synthetic construct
MKTLSQAQSKTSSQQFSFTGNSSANVIIGNQKLTINDVARVARNGTLVSLTNNTDILQGIQASCDYINNAVESGEPIYGVTSGFGGMANVAISREQASELQTNMVWFVKTGAGNKLPLADVRAAMLLRANSHMRGASGIRLELIKRMEIFLNAGVTPYVYEFGSIGASGDLVPLSYITGSLIGLDPSFKVDFNGKEMDAPTALRQLNLSPLTLLPKEGIAMTNGTSVMTGIAANCVYDTQILTAIAMGVHALDIQALNGTNQSFHPFIHNSKPHPGQLWAADQMISLLANSQLVRDELDGKHDYRDHELIQDRYSLRCLPQYLGPIVDGISQIAKQIEIEINSVTDNPLIDVDNQASYHGGNFLGQYVGMGMDHLRYYIGLLAKHLDVQIALLASPEFSNGLPPSLLGNRERKVNMGLKGLQICGNSIMPLLTFYGNSIADRFPTHAEQFNQNINSQGYTSATLARRSVDIFQNYVAIALMFGVQAVDLRTYKKTGHYDARACLSPATERLYSAVRHVVGQKPTSDRPYIWNDNEQGLDEHIARISADIAAGGVIVQAVQDILPCLH

SEQ ID NO: 187 - protein, 567 aa, synthetic construct
MKTLSQAQSKTSSQQFSFTGNSSANVIIGNQKLTINDVARVARNGTLVSLTNNTDILQGIQASCDYINNAVESGEPIYGVTSGFGGMANVAISREQASELQKNMVWFHKTGAGNKLPLADVRAAMLLRANSHMRGASGIRLELIKRMEIFLNAGVTPYVYEFGSIGASGDLVPLSYITGSLIGLDPSFKVDFNGKEMDAPTALRQLNLSPLTLLPKEALAMLNGTSVMTGIAANCVYDTQILTAIAMGVHALDIQALNGTNQSFHPFIHNSKPHPGQLWAADQMISLLANSQLVRDELDGKHDYRDHELIQDRYSLRCLPQYLGPIVDGISQIAKQIEIEINSVTDNPLIDVDNQASYHGGNFLGQYVGMGMDHLRYYIGLLAKHLDVQIALLASPEFSNGLPPSLLGNRERKVNMGLKGLQICGNSIMPLLTFYGNSIADRFPTHAEQFNQNINSQGYTSATLARRSVDIFQNYVAIALMFGVQAVDLRTYKKTGHYDARACLSPATERLYSAVRHVVGQKPTSDRPYIWNDNEQGLDEHIARISADIAAGGVIVQAVQDILPCLH

SEQ ID NO: 188 - protein, 567 aa, synthetic construct
MKTLSQAQSKTSSQQFSFTGNSSANVIIGNQKLTINDVARVARNGTLVSLTNNTDILQGIQASCDYINNAVESGEPIYGVTSGFGGMANVAISREQASELQHNLVWFHKTGAGNKLPLADVRAAMLLRANSHMRGASGIRLELIKRMEIFLNAGVTPYVYEFGSIGASGDLVPLSYITGSLIGLDPSFKVDFNGKEMDAPTALRQLNLSPLTLLPKESLAMMNGTSVMTGIAANCVYDTQILTAIAMGVHALDIQALNGTNQSFHPFIHNSKPHPGQLWAADQMISLLANSQLVRDELDGKHDYRDHELIQDRYSLRCLPQYLGPIVDGISQIAKQIEIEINSVTDNPLIDVDNQASYHGGNFLGQYVGMGMDHLRYYIGLLAKHLDVQIALLASPEFSNGLPPSLLGNRERKVNMGLKGLQICGNSIMPLLTFYGNSIADRFPTHAEQFNQNINSQGYTSATLARRSVDIFQNYVAIALMFGVQAVDLRTYKKTGHYDARACLSPATERLYSAVRHVVGQKPTSDRPYIWNDNEQGLDEHIARISADIAAGGVIVQAVQDILPCLH

SEQ ID NO: 189 - protein, 567 aa, synthetic construct
MKTLSQAQSKTSSQQFSFTGNSSANVIIGNQKLTINDVARVARNGTLVSLTNNTDILQGIQASCDYINNAVESGEPIYGVTSGFGGMANVAISREQASELQENLVWYHKTGAGNKLPLADVRAAMLLRANSHMRGASGIRLELIKRMEIFLNAGVTPYVYEFGSIGASGDLVPLSYITGSLIGLDPSFKVDFNGKEMDAPTALRQLNLSPLTLLPKESIAMMNGTSVMTGIAANCVYDTQILTAIAMGVHALDIQALNGTNQSFHPFIHNSKPHPGQLWAADQMISLLANSQLVRDELDGKHDYRDHELIQDRYSLRCLPQYLGPIVDGISQIAKQIEIEINSVTDNPLIDVDNQASYHGGNFLGQYVGMGMDHLRYYIGLLAKHLDVQIALLASPEFSNGLPPSLLGNRERKVNMGLKGLQICGNSIMPLLTFYGNSIADRFPTHAEQFNQNINSQGYTSATLARRSVDIFQNYVAIALMFGVQAVDLRTYKKTGHYDARACLSPATERLYSAVRHVVGQKPTSDRPYIWNDNEQGLDEHIARISADIAAGGVIVQAVQDILPCLH

SEQ ID NO: 190 - protein, 567 aa, synthetic construct
MKTLSQAQSKTSSQQFSFTGNSSANVIIGNQKLTINDVARVARNGTLVSLTNNTDILQGIQASCDYINNAVESGEPIYGVTSGFGGMANVAISREQASELQENLVWYTKTGAGNKLPLADVRAAMLLRANSHMRGASGIRLELIKRMEIFLNAGVTPYVYEFGSIGASGDLVPLSYITGSLIGLDPSFKVDFNGKEMDAPTALRQLNLSPLTLLPKEALAMLNGTSVMTGIAANCVYDTQILTAIAMGVHALDIQALNGTNQSFHPFIHNSKPHPGQLWAADQMISLLANSQLVRDELDGKHDYRDHELIQDRYSLRCLPQYLGPIVDGISQIAKQIEIEINSVTDNPLIDVDNQASYHGGNFLGQYVGMGMDHLRYYIGLLAKHLDVQIALLASPEFSNGLPPSLLGNRERKVNMGLKGLQICGNSIMPLLTFYGNSIADRFPTHAEQFNQNINSQGYTSATLARRSVDIFQNYVAIALMFGVQAVDLRTYKKTGHYDARACLSPATERLYSAVRHVVGQKPTSDRPYIWNDNEQGLDEHIARISADIAAGGVIVQAVQDILPCLH

SEQ ID NO: 191 - protein, 567 aa, synthetic construct
MKTLSQAQSKTSSQQFSFTGNSSANVIIGNQKLTINDVARVARNGTLVSLTNNTDILQGIQASCDYINNAVESGEPIYGVTSGFGGMANVAISREQASELQTNLVWHHKTGAGNKLPLADVRAAMLLRANSHMRGASGIRLELIKRMEIFLNAGVTPYVYEFGSIGASGDLVPLSYITGSLIGLDPSFKVDFNGKEMDAPTALRQLNLSPLTLLPKEALAMMNGTSVMTGIAANCVYDTQILTAIAMGVHALDIQALNGTNQSFHPFIHNSKPHPGQLWAADQMISLLANSQLVRDELDGKHDYRDHELIQDRYSLRCLPQYLGPIVDGISQIAKQIEIEINSVTDNPLIDVDNQASYHGGNFLGQYVGMGMDHLRYYIGLLAKHLDVQIALLASPEFSNGLPPSLLGNRERKVNMGLKGLQICGNSIMPLLTFYGNSIADRFPTHAEQFNQNINSQGYTSATLARRSVDIFQNYVAIALMFGVQAVDLRTYKKTGHYDARACLSPATERLYSAVRHVVGQKPTSDRPYIWNDNEQGLDEHIARISADIAAGGVIVQAVQDILPCLH

SEQ ID NO: 192 - protein, 567 aa, synthetic construct
MKTLSQAQSKTSSQQFSFTGNSSANVIIGNQKLTINDVARVARNGTLVSLTNNTDILQGIQASCDYINNAVESGEPIYGVTSGFGGMANVAISREQASELQENMVWYTKTGAGNKLPLADVRAAMLLRANSHMRGASGIRLELIKRMEIFLNAGVTPYVYEFGSIGASGDLVPLSYITGSLIGLDPSFKVDFNGKEMDAPTALRQLNLSPLTLLPKESLAMINGTSVMTGIAANCVYDTQILTAIAMGVHALDIQALNGTNQSFHPFIHNSKPHPGQLWAADQMISLLANSQLVRDELDGKHDYRDHELIQDRYSLRCLPQYLGPIVDGISQIAKQIEIEINSVTDNPLIDVDNQASYHGGNFLGQYVGMGMDHLRYYIGLLAKHLDVQIALLASPEFSNGLPPSLLGNRERKVNMGLKGLQICGNSIMPLLTFYGNSIADRFPTHAEQFNQNINSQGYTSATLARRSVDIFQNYVAIALMFGVQAVDLRTYKKTGHYDARACLSPATERLYSAVRHVVGQKPTSDRPYIWNDNEQGLDEHIARISADIAAGGVIVQAVQDILPCLH

SEQ ID NO: 193 - protein, 567 aa, synthetic construct
MKTLSQAQSKTSSQQFSFTGNSSANVIIGNQKLTINDVARVARNGTLVSLTNNTDILQGIQASCDYINNAVESGEPIYGVTSGFGGMANVAISREQASELQTNMVWYVKTGAGNKLPLADVRAAMLLRANSHMRGASGIRLELIKRMEIFLNAGVTPYVYEFGSIGASGDLVPLSYITGSLIGLDPSFKVDFNGKEMDAPTALRQLNLSPLTLLPKESIAMLNGTSVMTGIAANCVYDTQILTAIAMGVHALDIQALNGTNQSFHPFIHNSKPHPGQLWAADQMISLLANSQLVRDELDGKHDYRDHELIQDRYSLRCLPQYLGPIVDGISQIAKQIEIEINSVTDNPLIDVDNQASYHGGNFLGQYVGMGMDHLRYYIGLLAKHLDVQIALLASPEFSNGLPPSLLGNRERKVNMGLKGLQICGNSIMPLLTFYGNSIADRFPTHAEQFNQNINSQGYTSATLARRSVDIFQNYVAIALMFGVQAVDLRTYKKTGHYDARACLSPATERLYSAVRHVVGQKPTSDRPYIWNDNEQGLDEHIARISADIAAGGVIVQAVQDILPCLH

SEQ ID NO: 194 - protein, 567 aa, synthetic construct
MKTLSQAQSKTSSQQFSFTGNSSANVIIGNQKLTINDVARVARNGTLVSLTNNTDILQGIQASCDYINNAVESGEPIYGVTSGFGGMANVAISREQASELQSNLVWSQKTGAGNKLPLADVRAAMLLRANSHMRGASGIRLELIKRMEIFLNAGVTPYVYEFGSIGASGDLVPLSYITGSLIGLDPSFKVDFNGKEMDAPTALRQLNLSPLTLLPKEGIAMLNGTSVMTGIAANCVYDTQILTAIAMGVHALDIQALNGTNQSFHPFIHNSKPHPGQLWAADQMISLLANSQLVRDELDGKHDYRDHELIQDRYSLRCLPQYLGPIVDGISQIAKQIEIEINSVTDNPLIDVDNQASYHGGNFLGQYVGMGMDHLRYYIGLLAKHLDVQIALLASPEFSNGLPPSLLGNRERKVNMGLKGLQICGNSIMPLLTFYGNSIADRFPTHAEQFNQNINSQGYTSATLARRSVDIFQNYVAIALMFGVQAVDLRTYKKTGHYDARACLSPATERLYSAVRHVVGQKPTSDRPYIWNDNEQGLDEHIARISADIAAGGVIVQAVQDILPCLH

SEQ ID NO: 195 - protein, 567 aa, synthetic construct
MKTLSQAQSKTSSQQFSFTGNSSANVIIGNQKLTINDVARVARNGTLVSLTNNTDILQGIQASCDYINNAVESGEPIYGVTSGFGGMANVAISREQASELQSNLVWSHKTGAGNKLPLADVRAAMLLRANSHMRGASGIRLELIKRMEIFLNAGVTPYVYEFGSIGASGDLVPLSYITGSLIGLDPSFKVDFNGKEMDAPTALRQLNLSPLTLLPKEGIAMNNGTSVMTGIAANCVYDTQILTAIAMGVHALDIQALNGTNQSFHPFIHNSKPHPGQLWAADQMISLLANSQLVRDELDGKHDYRDHELIQDRYSLRCLPQYLGPIVDGISQIAKQIEIEINSVTDNPLIDVDNQASYHGGNFLGQYVGMGMDHLRYYIGLLAKHLDVQIALLASPEFSNGLPPSLLGNRERKVNMGLKGLQICGNSIMPLLTFYGNSIADRFPTHAEQFNQNINSQGYTSATLARRSVDIFQNYVAIALMFGVQAVDLRTYKKTGHYDARACLSPATERLYSAVRHVVGQKPTSDRPYIWNDNEQGLDEHIARISADIAAGGVIVQAVQDILPCLH

SEQ ID NO: 196 - DNA, 5122 bp, synthetic construct
  source 1..5122: mol_type = other DNA
aggctaggtggaggctcagtgatgataagtctgcgatggtggatgcatgtgtcatggtcatagctgtttcctgtgtgaaattgttatccgctcagagggcacaatcctattccgcgctatccgacaatctccaagacattaggtggagttcagttcggcgagcggaaatggcttacgaacggggcggagatttcctggaagatgccaggaagatacttaacagggaagtgagagggccgcggcaaagccgtttttccataggctccgcccccctgacaagcatcacgaaatctgacgctcaaatcagtggtggcgaaacccgacaggactataaagataccaggcgtttccccctggcggctccctcgtgcgctctcctgttcctgcctttcggtttaccggtgtcattccgctgttatggccgcgtttgtctcattccacgcctgacactcagttccgggtaggcagttcgctccaagctggactgtatgcacgaaccccccgttcagtccgaccgctgcgccttatccggtaactatcgtcttgagtccaacccggaaagacatgcaaaagcaccactggcagcagccactggtaattgatttagaggagttagtcttgaagtcatgcgccggttaaggctaaactgaaaggacaagttttggtgactgcgctcctccaagccagttacctcggttcaaagagttggtagctcagagaaccttcgaaaaaccgccctgcaaggcggttttttcgttttcagagcaagagattacgcgcagaccaaaacgatctcaagaagatcatcttattaagtctgacgctctattcaacaaagccgccgtccatgggtagggggcttcaaatcgtcctcgtgataccaattcggagcctgcttttttgtacaaacttgttgataatggcaattcaaggatcttcacctagatccttttaaattaaaaatgaagttttaaatcaatctaaagtatatatgagtaaacttggtctgacagttaccaatgcttaatcagtgaggcacctatctcagcgatctgtctatttcgttcatccatagttgcctgactccccgtcgtgtagataactacgatacgggagggcttaccatctggccccagtgctgcaatgataccgcgagagccacgctcaccggctccagatttatcagcaataaaccagccagccggaagggccgagcgcagaagtggtcctgcaactttatccgcctccatccagtctattaattgttgccgggaagctagagtaagtagttcgccagttaatagtttgcgcaacgttgttgccattgctacaggcatcgtggtgtcacgctcgtcgtttggtatggcttcattcagctccggttcccaacgatcaaggcgagttacatgatcccccatgttgtgcaaaaaagcggttagctccttcggtcctccgatcgttgtcagaagtaagttggccgcagtgttatcactcatggttatggcagcactgcataattctcttactgtcatgccatccgtaagatgcttttctgtgactggtgagtactcaaccaagtcattctgagaatagtgtatgcggcgaccgagttgctcttgcccggcgtcaatacgggataataccgcgccacatagcagaactttaaaagtgctcatcattggaaaacgttcttcggggcgaaaactctcaaggatcttaccgctgttgagatccagttcgatgtaacccactcgtgcacccaactgatcttcagcatcttttactttcaccagcgtttctgggtgagcaaaaacaggaaggcaaaatgccgcaaaaaagggaataagggcgacacggaaatgttgaatactcatactcttcctttttcaatattattgaagcatttatcagggttattgtctcatgagcggatacatatttgaatgtatttagaaaaataaacaaataggggttccgcgcacatttccccgaaaagtgccagatacctgaaacaaaacccatcgtacggccaaggaagtctccaataactgtgatccaccacaagcgccagggttttcccagtcacgacgttgtaaaacgacggccagtcatgcataatccgcacgcatctggaataaggaagtgccattccgcctgacctttgcctatgaggaccaaaacgaaaaaacaccctttcgggtgtcttttctggaatttggtaccgagaggctccatgattcagtatgacttgcctttggtcgaaaaaaaaagcccgcactgtcaggtgcgggcttttttctgtgtttccttattaggacccactttcacatttaagttgtttttctaatccgcatatgatcaattcaaggccgaataagaaggctggctctgcaccttggtgatcaaataattcgatagcttgtcgtaataatggcggcatactatcagtagtaggtgtttccctttcttctttagcgacttgatgctcttgatcttccaatacgcaacctaaagtaaaatgccccacagcgctgagtgcatataatgcattctctagtgaaaaaccttgttggcataaaaaggctaattgattttcgagagtttcatactgtttttctgtaggccgtgtacctaaatgtacttttgctccatcgcgatgacttagtaaagcacatctaaaacttttagcgttattacgtaaaaaatcttgccagctttccccttctaaagggcaaaagtgagtatggtgcctatctaacatctcaatggctaaggcgtcgagcaaagcccgcttattttttacatgccaatacaatgtaggctgctctacacctagcttctgggcgagtttacgggttgttaaaccttcgattccgacctcattaagcagctctaatgcgctgttaatcactttacttttatctaatctggacatattcaccaccctgaattgactctcttccgggcgctatcatgccataccgcgaaaggttttgcgccattcgatggcgcgccgccattgcttgtgcaatgtacatcagagattttgagacacaaccaattattgaaggcctccctaacggggggcctttttttgtttctggtcccccgcttaacgatcgttggctgttttcagcaggacgcactgacctccctatcagtgatagagattgacatccctatcagtgatagagatactgagcacagctgtcaccggatgtgctttccggtctgatgagtccgtgaggacgaaacagcctctacaaataattttgtttaaatcacacgggtaaggaggtatttaaatgaaaacactgtcccaagcacagtcgaagacgagtagccagcagttttctttcaccggtaattctagcgctaacgtgattatcggcaaccagaaactaactatcaacgacgtcgcccgcgttgctcggaacgggaccttagtaagcctgactaacaacactgatatacttcaaggcattcaggcgtcctgtgattatatcaataacgcagttgagtctggtgaaccaatttacggtgtgacctcaggcttcggcggtatggcgaacgttgctatcagccgtgaacaggcctccgaactgcaaaccaatttggtatggtttctgaaaactggtgctgggaacaaactccctttggcggacgtacgtgcagcaatgctgctgcgcgccaactcgcatatgcgtggcgcgtccggtatccgtctggagctgatcaaacgtatggaaatcttcttgaacgctggtgttactccgtacgtttatgaatttggatctatcggcgcttctggagatctggtcccgctgagctacattacgggttccctgattggccttgacccgagcttcaaggtggatttcaacggcaaagaaatggacgccccgaccgcgttacgccagttaaatctgtctcccctgacacttctgcctaaagaagcactagctatgatgaatgggacctcagtcatgactggcatcgcagctaactgcgtatacgacacccagatcctgactgcgattgcaatgggtgttcacgctctggatatccaggccctgaacggcaccaaccagtctttccacccgtttatccataactctaagccgcacccaggtcagctgtgggcggctgatcagatgatatcattgctggctaactcgcaactggtacgggacgagctggacggcaaacatgattaccgcgaccacgagctgatccaggatcgttatagcctgcgttgccttccgcagtacctgggtccgattgtggacggtatctcacagatagcaaaacaaatcgaaattgaaattaactccgttactgataaccctctgattgacgtcgataaccaggcgtcgtaccacggcggaaatttcctgggtcagtatgttggcatgggtatggaccaccttcgctactatatcggcctgctggcgaaacacctggatgtgcagattgcgctgctagctagtcccgaatttagcaacggactgccgccatctttattgggcaaccgtgaacgtaaggttaacatgggtctgaaaggtttacaaatctgtggcaattccatcatgccgctgctgacgttctacggcaatagcatcgccgaccgctttccgacccatgcagagcaattcaaccagaatatcaactctcagggctacacctccgcaacgctggcgcgacgtagtgttgatatcttccaaaactacgttgcgattgccctgatgtttggcgtccaggctgtagacctgaggacttataaaaagactggccattacgatgcgcgtgcttgcctctctccggctaccgaacgcctgtattccgccgtgcgtcacgtagttggtcagaaacctacttcagatcgcccatacatctggaacgataacgagcagggtctggatgaacacatcgctcgcatctccgctgacattgccgctggcggagtaattgttcaagctgtacaggatatcctgccgtgcctgcactaaccggcttatcggtcagtttcacctgatttacgtaaaaacccgcttcggcgggtttttgcttttggaggggcagaaagatgaatgactgtccacgacgctatacccaaaagaaa

SEQ ID NO: 197 - DNA, 4990 bp, synthetic construct
  source 1..4990: mol_type = other DNA
aggctaggtggaggctcagtgatgataagtctgcgatggtggatgcatgtgtcatggtcatagctgtttcctgtgtgaaattgttatccgctcagagggcacaatcctattccgcgctatccgacaatctccaagacattaggtggagttcagttcggcgagcggaaatggcttacgaacggggcggagatttcctggaagatgccaggaagatacttaacagggaagtgagagggccgcggcaaagccgtttttccataggctccgcccccctgacaagcatcacgaaatctgacgctcaaatcagtggtggcgaaacccgacaggactataaagataccaggcgtttccccctggcggctccctcgtgcgctctcctgttcctgcctttcggtttaccggtgtcattccgctgttatggccgcgtttgtctcattccacgcctgacactcagttccgggtaggcagttcgctccaagctggactgtatgcacgaaccccccgttcagtccgaccgctgcgccttatccggtaactatcgtcttgagtccaacccggaaagacatgcaaaagcaccactggcagcagccactggtaattgatttagaggagttagtcttgaagtcatgcgccggttaaggctaaactgaaaggacaagttttggtgactgcgctcctccaagccagttacctcggttcaaagagttggtagctcagagaaccttcgaaaaaccgccctgcaaggcggttttttcgttttcagagcaagagattacgcgcagaccaaaacgatctcaagaagatcatcttattaagtctgacgctctattcaacaaagccgccgtccatgggtagggggcttcaaatcgtcctcgtgataccaattcggagcctgcttttttgtacaaacttgttgataatggcaattcaaggatcttcacctagatccttttaaattaaaaatgaagttttaaatcaatctaaagtatatatgagtaaacttggtctgacagttaccaatgcttaatcagtgaggcacctatctcagcgatctgtctatttcgttcatccatagttgcctgactccccgtcgtgtagataactacgatacgggagggcttaccatctggccccagtgctgcaatgataccgcgagagccacgctcaccggctccagatttatcagcaataaaccagccagccggaagggccgagcgcagaagtggtcctgcaactttatccgcctccatccagtctattaattgttgccgggaagctagagtaagtagttcgccagttaatagtttgcgcaacgttgttgccattgctacaggcatcgtggtgtcacgctcgtcgtttggtatggcttcattcagctccggttcccaacgatcaaggcgagttacatgatcccccatgttgtgcaaaaaagcggttagctccttcggtcctccgatcgttgtcagaagtaagttggccgcagtgttatcactcatggttatggcagcactgcataattctcttactgtcatgccatccgtaagatgcttttctgtgactggtgagtactcaaccaagtcattctgagaatagtgtatgcggcgaccgagttgctcttgcccggcgtcaatacgggataataccgcgccacatagcagaactttaaaagtgctcatcattggaaaacgttcttcggggcgaaaactctcaaggatcttaccgctgttgagatccagttcgatgtaacccactcgtgcacccaactgatcttcagcatcttttactttcaccagcgtttctgggtgagcaaaaacaggaaggcaaaatgccgcaaaaaagggaataagggcgacacggaaatgttgaatactcatactcttcctttttcaatattattgaagcatttatcagggttattgtctcatgagcggatacatatttgaatgtatttagaaaaataaacaaataggggttccgcgcacatttccccgaaaagtgccagatacctgaaacaaaacccatcgtacggccaaggaagtctccaataactgtgatccaccacaagcgccagggttttcccagtcacgacgttgtaaaacgacggccagtcatgcataatccgcacgcatctggaataaggaagtgccattccgcctgacctttgcctatgaggaccaaaacgaaaaaacaccctttcgggtgtcttttctggaatttggtaccgagaggctccatgattcagtatgacttgcctttggtcgaaaaaaaaagcccgcactgtcaggtgcgggcttttttctgtgtttccttattaggacccactttcacatttaagttgtttttctaatccgcatatgatcaattcaaggccgaataagaaggctggctctgcaccttggtgatcaaataattcgatagcttgtcgtaataatggcggcatactatcagtagtaggtgtttccctttcttctttagcgacttgatgctcttgatcttccaatacgcaacctaaagtaaaatgccccacagcgctgagtgcatataatgcattctctagtgaaaaaccttgttggcataaaaaggctaattgattttcgagagtttcatactgtttttctgtaggccgtgtacctaaatgtacttttgctccatcgcgatgacttagtaaagcacatctaaaacttttagcgttattacgtaaaaaatcttgccagctttccccttctaaagggcaaaagtgagtatggtgcctatctaacatctcaatggctaaggcgtcgagcaaagcccgcttattttttacatgccaatacaatgtaggctgctctacacctagcttctgggcgagtttacgggttgttaaaccttcgattccgacctcattaagcagctctaatgcgctgttaatcactttacttttatctaatctggacatattcaccaccctgaattgactctcttccgggcgctatcatgccataccgcgaaaggttttgcgccattcgatggcgcgccgccattgcttgtgcaatgtacatcagagattttgagacacaaccaattattgaaggcctccctaacggggggcctttttttgtttctggtcccccgcttaacgatcgttggctgttttcagcaggacgcactgacctccctatcagtgatagagattgacatccctatcagtgatagagatactgagcacagctgtcaccggatgtgctttccggtctgatgagtccgtgaggacgaaacagcctctacaaataattttgtttaaatcacacgggtaaggaggtatttaaatgttggccatgtcaccaccgaaacctgctgttgagcttgaccggcacatcgatctggatcaagcgcatgctgtggcatccgggggcgcacgcattgtactcgctcccccggcgcgtgaccgttgccgcgcatcggaagctcgtctgggagctgtcatccgagaagcgcgtcacgtatacggtctgactacgggctttggtccgctggccaaccgtctgataagcggtgaaaatgttcgcacattacaggcgaacctggttcatcacctagcctctggcgtgggcccggtcctggactggaccactgcacgtgctatggttctggctcgcctggtatccatcgctcagggtgcctctggtgctagtgagggtaccattgcgcgtctgatcgatcttctgaactctgaactggcaccggcggttccttcgcgcggcaccgtcggcgccagcggcgatttaactccgctggcacacatggttctgtgtctgcaaggtcgtggtgacttcctcgacagagatggtacccgtctggacggcgcggaaggcctccggcgtgggcgcctgcaaccgctggatctgtctcatcgcgacgcattggctctggtgaacgggacttccgccatgacgggtattgctctggttaacgcccacgcatgccgccacctgggcaattgggctgtggctctaaccgcactgctagcagaatgtctgcgtggtaggaccgaggcttgggctgctgcgctttctgatctgcgtccacacccaggtcagaaggacgcggctgcgcgtttgagagctcgcgtagacggcagtgcgcgtgtagtccgccatgttatcgccgaacgtcgtctggatgccggcgatattggcactgaacctgaggcaggtcaggacgcttatagcctgcgttgcgcgcctcaggttctgggggcaggcttcgatactctggcatggcacgaccgtgtgttaacaatcgaattaaacgccgtaaccgataatccggttttcccgcccgacggtagcgtaccagctttgcatggtgggaactttatgggacagcatgtagcactgacgagcgatgctttggctactgctgtcactgtgctggcgggcctggcggagcgccagatcgcacgcctgaccgacgaacgactgaaccgtggtcttccgccgttcctgcaccgtggaccggcaggtctgaactccggctttatgggcgcacaggttacagctactgcgctgcttgctgaaatgcgcgcaaccggtccggcaagtatccattctatctccaccaacgcggccaaccaggatgtggtgtcactaggaaccattgctgctcgtctgtgccgtgaaaaaatcgaccgttgggcggaaatacttgcgatcctggctctgtgcctggctcaggctgcggaattacgctgtggctctggtctggacggtgtcagccccgccggcaaaaagctggttcaggcactacgtgagcagttcccgccgctggaaacggatagaccgctgggacaagaaatagcggctctcgctactcacctgttacagcagagcccggtttaaccggcttatcggtcagtttcacctgatttacgtaaaaacccgcttcggcgggtttttgcttttggaggggcagaaagatgaatgactgtccacgacgctatacccaaaagaaa

SEQ ID NO: 198 - DNA, 5122 bp, synthetic construct
  source 1..5122: mol_type = other DNA
aggctaggtggaggctcagtgatgataagtctgcgatggtggatgcatgtgtcatggtcatagctgtttcctgtgtgaaattgttatccgctcagagggcacaatcctattccgcgctatccgacaatctccaagacattaggtggagttcagttcggcgagcggaaatggcttacgaacggggcggagatttcctggaagatgccaggaagatacttaacagggaagtgagagggccgcggcaaagccgtttttccataggctccgcccccctgacaagcatcacgaaatctgacgctcaaatcagtggtggcgaaacccgacaggactataaagataccaggcgtttccccctggcggctccctcgtgcgctctcctgttcctgcctttcggtttaccggtgtcattccgctgttatggccgcgtttgtctcattccacgcctgacactcagttccgggtaggcagttcgctccaagctggactgtatgcacgaaccccccgttcagtccgaccgctgcgccttatccggtaactatcgtcttgagtccaacccggaaagacatgcaaaagcaccactggcagcagccactggtaattgatttagaggagttagtcttgaagtcatgcgccggttaaggctaaactgaaaggacaagttttggtgactgcgctcctccaagccagttacctcggttcaaagagttggtagctcagagaaccttcgaaaaaccgccctgcaaggcggttttttcgttttcagagcaagagattacgcgcagaccaaaacgatctcaagaagatcatcttattaagtctgacgctctattcaacaaagccgccgtccatgggtagggggcttcaaatcgtcctcgtgataccaattcggagcctgcttttttgtacaaacttgttgataatggcaattcaaggatcttcacctagatccttttaaattaaaaatgaagttttaaatcaatctaaagtatatatgagtaaacttggtctgacagttaccaatgcttaatcagtgaggcacctatctcagcgatctgtctatttcgttcatccatagttgcctgactccccgtcgtgtagataactacgatacgggagggcttaccatctggccccagtgctgcaatgataccgcgagagccacgctcaccggctccagatttatcagcaataaaccagccagccggaagggccgagcgcagaagtggtcctgcaactttatccgcctccatccagtctattaattgttgccgggaagctagagtaagtagttcgccagttaatagtttgcgcaacgttgttgccattgctacaggcatcgtggtgtcacgctcgtcgtttggtatggcttcattcagctccggttcccaacgatcaaggcgagttacatgatcccccatgttgtgcaaaaaagcggttagctccttcggtcctccgatcgttgtcagaagtaagttggccgcagtgttatcactcatggttatggcagcactgcataattctcttactgtcatgccatccgtaagatgcttttctgtgactggtgagtactcaaccaagtcattctgagaatagtgtatgcggcgaccgagttgctcttgcccggcgtcaatacgggataataccgcgccacatagcagaactttaaaagtgctcatcattggaaaacgttcttcggggcgaaaactctcaaggatcttaccgctgttgagatccagttcgatgtaacccactcgtgcacccaactgatcttcagcatcttttactttcaccagcgtttctgggtgagcaaaaacaggaaggcaaaatgccgcaaaaaagggaataagggcgacacggaaatgttgaatactcatactcttcctttttcaatattattgaagcatttatcagggttattgtctcatgagcggatacatatttgaatgtatttagaaaaataaacaaataggggttccgcgcacatttccccgaaaagtgccagatacctgaaacaaaacccatcgtacggccaaggaagtctccaataactgtgatccaccacaagcgccagggttttcccagtcacgacgttgtaaaacgacggccagtcatgcataatccgcacgcatctggaataaggaagtgccattccgcctgacctttgcctatgaggaccaaaacgaaaaaacaccctttcgggtgtcttttctggaatttggtaccgagaggctccatgattcagtatgacttgcctttggtcgaaaaaaaaagcccgcactgtcaggtgcgggcttttttctgtgtttccttattaggacccactttcacatttaagttgtttttctaatccgcatatgatcaattcaaggccgaataagaaggctggctctgcaccttggtgatcaaataattcgatagcttgtcgtaataatggcggcatactatcagtagtaggtgtttccctttcttctttagcgacttgatgctcttgatcttccaatacgcaacctaaagtaaaatgccccacagcgctgagtgcatataatgcattctctagtgaaaaaccttgttggcataaaaaggctaattgattttcgagagtttcatactgtttttctgtaggccgtgtacctaaatgtacttttgctccatcgcgatgacttagtaaagcacatctaaaacttttagcgttattacgtaaaaaatcttgccagctttccccttctaaagggcaaaagtgagtatggtgcctatctaacatctcaatggctaaggcgtcgagcaaagcccgcttattttttacatgccaatacaatgtaggctgctctacacctagcttctgggcgagtttacgggttgttaaaccttcgattccgacctcattaagcagctctaatgcgctgttaatcactttacttttatctaatctggacatattcaccaccctgaattgactctcttccgggcgctatcatgccataccgcgaaaggttttgcgccattcgatggcgcgccgccattgcttgtgcaatgtacatcagagattttgagacacaaccaattattgaaggcctccctaacggggggcctttttttgtttctggtcccccgcttaacgatcgttggctgttttcagcaggacgcactgacctccctatcagtgatagagattgacatccctatcagtgatagagatactgagcacagctgtcaccggatgtgctttccggtctgatgagtccgtgaggacgaaacagcctctacaaataattttgtttaaatcacacgggtaaggaggtatttaaatgaaaacactgtcccaagcacagtcgaagacgagtagccagcagttttctttcaccggtaattctagcgctaacgtgattatcggcaaccagaaactaactatcaacgacgtcgcccgcgttgctcggaacgggaccttagtaagcctgactaacaacactgatatacttcaaggcattcaggcgtcctgtgattatatcaataacgcagttgagtctggtgaaccaatttacggtgtgacctcaggcttcggcggtatggcgaacgttgctatcagccgtgaacaggcctccgaactgcaacacaatatggtatggtttctgaaaactggtgctgggaacaaactccctttggcggacgtacgtgcagcaatgctgctgcgcgccaactcgcatatgcgtggcgcgtccggtatccgtctggagctgatcaaacgtatggaaatcttcttgaacgctggtgttactccgtacgtttatgaatttggatctatcggcgcttctggagatctggtcccgctgagctacattacgggttccctgattggccttgacccgagcttcaaggtggatttcaacggcaaagaaatggacgccccgaccgcgttacgccagttaaatctgtctcccctgacacttctgcctaaagaagcgctagctatgatgaatgggacctcagtcatgactggcatcgcagctaactgcgtatacgacacccagatcctgactgcgattgcaatgggtgttcacgctctggatatccaggccctgaacggcaccaaccagtctttccacccgtttatccataactctaagccgcacccaggtcagctgtgggcggctgatcagatgatatcattgctggctaactcgcaactggtacgggacgagctggacggcaaacatgattaccgcgaccacgagctgatccaggatcgttatagcctgcgttgccttccgcagtacctgggtccgattgtggacggtatctcacagatagcaaaacaaatcgaaattgaaattaactccgttactgataaccctctgattgacgtcgataaccaggcgtcgtaccacggcggaaatttcctgggtcagtatgttggcatgggtatggaccaccttcgctactatatcggcctgctggcgaaacacctggatgtgcagattgcgctgctagctagtcccgaatttagcaacggactgccgccatctttattgggcaaccgtgaacgtaaggttaacatgggtctgaaaggtttacaaatctgtggcaattccatcatgccgctgctgacgttctacggcaatagcatcgccgaccgctttccgacccatgcagagcaattcaaccagaatatcaactctcagggctacacctccgcaacgctggcgcgacgtagtgttgatatcttccaaaactacgttgcgattgccctgatgtttggcgtccaggctgtagacctgaggacttataaaaagactggccattacgatgcgcgtgcttgcctctctccggctaccgaacgcctgtattccgccgtgcgtcacgtagttggtcagaaacctacttcagatcgcccatacatctggaacgataacgagcagggtctggatgaacacatcgctcgcatctccgctgacattgccgctggcggagtaattgttcaagctgtacaggatatcctgccgtgcctgcactaaccggcttatcggtcagtttcacctgatttacgtaaaaacccgcttcggcgggtttttgcttttggaggggcagaaagatgaatgactgtccacgacgctatacccaaaagaaa

SEQ ID NO: 199 - DNA, 5122 bp, synthetic construct
  source 1..5122: mol_type = other DNA
aggctaggtggaggctcagtgatgataagtctgcgatggtggatgcatgtgtcatggtcatagctgtttcctgtgtgaaattgttatccgctcagagggcacaatcctattccgcgctatccgacaatctccaagacattaggtggagttcagttcggcgagcggaaatggcttacgaacggggcggagatttcctggaagatgccaggaagatacttaacagggaagtgagagggccgcggcaaagccgtttttccataggctccgcccccctgacaagcatcacgaaatctgacgctcaaatcagtggtggcgaaacccgacaggactataaagataccaggcgtttccccctggcggctccctcgtgcgctctcctgttcctgcctttcggtttaccggtgtcattccgctgttatggccgcgtttgtctcattccacgcctgacactcagttccgggtaggcagttcgctccaagctggactgtatgcacgaaccccccgttcagtccgaccgctgcgccttatccggtaactatcgtcttgagtccaacccggaaagacatgcaaaagcaccactggcagcagccactggtaattgatttagaggagttagtcttgaagtcatgcgccggttaaggctaaactgaaaggacaagttttggtgactgcgctcctccaagccagttacctcggttcaaagagttggtagctcagagaaccttcgaaaaaccgccctgcaaggcggttttttcgttttcagagcaagagattacgcgcagaccaaaacgatctcaagaagatcatcttattaagtctgacgctctattcaacaaagccgccgtccatgggtagggggcttcaaatcgtcctcgtgataccaattcggagcctgcttttttgtacaaacttgttgataatggcaattcaaggatcttcacctagatccttttaaattaaaaatgaagttttaaatcaatctaaagtatatatgagtaaacttggtctgacagttaccaatgcttaatcagtgaggcacctatctcagcgatctgtctatttcgttcatccatagttgcctgactccccgtcgtgtagataactacgatacgggagggcttaccatctggccccagtgctgcaatgataccgcgagagccacgctcaccggctccagatttatcagcaataaaccagccagccggaagggccgagcgcagaagtggtcctgcaactttatccgcctccatccagtctattaattgttgccgggaagctagagtaagtagttcgccagttaatagtttgcgcaacgttgttgccattgctacaggcatcgtggtgtcacgctcgtcgtttggtatggcttcattcagctccggttcccaacgatcaaggcgagttacatgatcccccatgttgtgcaaaaaagcggttagctccttcggtcctccgatcgttgtcagaagtaagttggccgcagtgttatcactcatggttatggcagcactgcataattctcttactgtcatgccatccgtaagatgcttttctgtgactggtgagtactcaaccaagtcattctgagaatagtgtatgcggcgaccgagttgctcttgcccggcgtcaatacgggataataccgcgccacatagcagaactttaaaagtgctcatcattggaaaacgttcttcggggcgaaaactctcaaggatcttaccgctgttgagatccagttcgatgtaacccactcgtgcacccaactgatcttcagcatcttttactttcaccagcgtttctgggtgagcaaaaacaggaaggcaaaatgccgcaaaaaagggaataagggcgacacggaaatgttgaatactcatactcttcctttttcaatattattgaagcatttatcagggttattgtctcatgagcggatacatatttgaatgtatttagaaaaataaacaaataggggttccgcgcacatttccccgaaaagtgccagatacctgaaacaaaacccatcgtacggccaaggaagtctccaataactgtgatccaccacaagcgccagggttttcccagtcacgacgttgtaaaacgacggccagtcatgcataatccgcacgcatctggaataaggaagtgccattccgcctgacctttgcctatgaggaccaaaacgaaaaaacaccctttcgggtgtcttttctggaatttggtaccgagaggctccatgattcagtatgacttgcctttggtcgaaaaaaaaagcccgcactgtcaggtgcgggcttttttctgtgtttccttattaggacccactttcacatttaagttgtttttctaatccgcatatgatcaattcaaggccgaataagaaggctggctctgcaccttggtgatcaaataattcgatagcttgtcgtaataatggcggcatactatcagtagtaggtgtttccctttcttctttagcgacttgatgctcttgatcttccaatacgcaacctaaagtaaaatgccccacagcgctgagtgcatataatgcattctctagtgaaaaaccttgttggcataaaaaggctaattgattttcgagagtttcatactgtttttctgtaggccgtgtacctaaatgtacttttgctccatcgcgatgacttagtaaagcacatctaaaacttttagcgttattacgtaaaaaatcttgccagctttccccttctaaagggcaaaagtgagtatggtgcctatctaacatctcaatggctaaggcgtcgagcaaagcccgcttattttttacatgccaatacaatgtaggctgctctacacctagcttctgggcgagtttacgggttgttaaaccttcgattccgacctcattaagcagctctaatgcgctgttaatcactttacttttatctaatctggacatattcaccaccctgaattgactctcttccgggcgctatcatgccataccgcgaaaggttttgcgccattcgatggcgcgccgccattgcttgtgcaatgtacatcagagattttgagacacaaccaattattgaaggcctccctaacggggggcctttttttgtttctggtcccccgcttaacgatcgttggctgttttcagcaggacgcactgacctccctatcagtgatagagattgacatccctatcagtgatagagatactgagcacagctgtcaccggatgtgctttccggtctgatgagtccgtgaggacgaaacagcctctacaaataattttgtttaaatcacacgggtaaggaggtatttaaatgaaaacactgtcccaagcacagtcgaagacgagtagccagcagttttctttcaccggtaattctagcgctaacgtgattatcggcaaccagaaactaactatcaacgacgtcgcccgcgttgctcggaacgggaccttagtaagcctgactaacaacactgatatacttcaaggcattcaggcgtcctgtgattatatcaataacgcagttgagtctggtgaaccaatttacggtgtgacctcaggcttcggcggtatggcgaacgttgctatcagccgtgaacaggcctccgaactgcaaaccaatatggtatggtttacgaaaactggtgctgggaacaaactccctttggcggacgtacgtgcagcaatgctgctgcgcgccaactcgcatatgcgtggcgcgtccggtatccgtctggagctgatcaaacgtatggaaatcttcttgaacgctggtgttactccgtacgtttatgaatttggatctatcggcgcttctggagatctggtcccgctgagctacattacgggttccctgattggccttgacccgagcttcaaggtggatttcaacggcaaagaaatggacgccccgaccgcgttacgccagttaaatctgtctcccctgacacttctgcctaaagaagcactagctatgatgaatgggacctcagtcatgactggcatcgcagctaactgcgtatacgacacccagatcctgactgcgattgcaatgggtgttcacgctctggatatccaggccctgaacggcaccaaccagtctttccacccgtttatccataactctaagccgcacccaggtcagctgtgggcggctgatcagatgatatcattgctggctaactcgcaactggtacgggacgagctggacggcaaacatgattaccgcgaccacgagctgatccaggatcgttatagcctgcgttgccttccgcagtacctgggtccgattgtggacggtatctcacagatagcaaaacaaatcgaaattgaaattaactccgttactgataaccctctgattgacgtcgataaccaggcgtcgtaccacggcggaaatttcctgggtcagtatgttggcatgggtatggaccaccttcgctactatatcggcctgctggcgaaacacctggatgtgcagattgcgctgctagctagtcccgaatttagcaacggactgccgccatctttattgggcaaccgtgaacgtaaggttaacatgggtctgaaaggtttacaaatctgtggcaattccatcatgccgctgctgacgttctacggcaatagcatcgccgaccgctttccgacccatgcagagcaattcaaccagaatatcaactctcagggctacacctccgcaacgctggcgcgacgtagtgttgatatcttccaaaactacgttgcgattgccctgatgtttggcgtccaggctgtagacctgaggacttataaaaagactggccattacgatgcgcgtgcttgcctctctccggctaccgaacgcctgtattccgccgtgcgtcacgtagttggtcagaaacctacttcagatcgcccatacatctggaacgataacgagcagggtctggatgaacacatcgctcgcatctccgctgacattgccgctggcggagtaattgttcaagctgtacaggatatcctgccgtgcctgcactaaccggcttatcggtcagtttcacctgatttacgtaaaaacccgcttcggcgggtttttgcttttggaggggcagaaagatgaatgactgtccacgacgctatacccaaaagaaa

SEQ ID NO: 200 - DNA, 5122 bp, synthetic construct
  source 1..5122: mol_type = other DNA
aggctaggtggaggctcagtgatgataagtctgcgatggtggatgcatgtgtcatggtcatagctgtttcctgtgtgaaattgttatccgctcagagggcacaatcctattccgcgctatccgacaatctccaagacattaggtggagttcagttcggcgagcggaaatggcttacgaacggggcggagatttcctggaagatgccaggaagatacttaacagggaagtgagagggccgcggcaaagccgtttttccataggctccgcccccctgacaagcatcacgaaatctgacgctcaaatcagtggtggcgaaacccgacaggactataaagataccaggcgtttccccctggcggctccctcgtgcgctctcctgttcctgcctttcggtttaccggtgtcattccgctgttatggccgcgtttgtctcattccacgcctgacactcagttccgggtaggcagttcgctccaagctggactgtatgcacgaaccccccgttcagtccgaccgctgcgccttatccggtaactatcgtcttgagtccaacccggaaagacatgcaaaagcaccactggcagcagccactggtaattgatttagaggagttagtcttgaagtcatgcgccggttaaggctaaactgaaaggacaagttttggtgactgcgctcctccaagccagttacctcggttcaaagagttggtagctcagagaaccttcgaaaaaccgccctgcaaggcggttttttcgttttcagagcaagagattacgcgcagaccaaaacgatctcaagaagatcatcttattaagtctgacgctctattcaacaaagccgccgtccatgggtagggggcttcaaatcgtcctcgtgataccaattcggagcctgcttttttgtacaaacttgttgataatggcaattcaaggatcttcacctagatccttttaaattaaaaatgaagttttaaatcaatctaaagtatatatgagtaaacttggtctgacagttaccaatgcttaatcagtgaggcacctatctcagcgatctgtctatttcgttcatccatagttgcctgactccccgtcgtgtagataactacgatacgggagggcttaccatctggccccagtgctgcaatgataccgcgagagccacgctcaccggctccagatttatcagcaataaaccagccagccggaagggccgagcgcagaagtggtcctgcaactttatccgcctccatccagtctattaattgttgccgggaagctagagtaagtagttcgccagttaatagtttgcgcaacgttgttgccattgctacaggcatcgtggtgtcacgctcgtcgtttggtatggcttcattcagctccggttcccaacgatcaaggcgagttacatgatcccccatgttgtgcaaaaaagcggttagctccttcggtcctccgatcgttgtcagaagtaagttggccgcagtgttatcactcatggttatggcagcactgcataattctcttactgtcatgccatccgtaagatgcttttctgtgactggtgagtactcaaccaagtcattctgagaatagtgtatgcggcgaccgagttgctcttgcccggcgtcaatacgggataataccgcgccacatagcagaactttaaaagtgctcatcattggaaaacgttcttcggggcgaaaactctcaaggatcttaccgctgttgagatccagttcgatgtaacccactcgtgcacccaactgatcttcagcatcttttactttcaccagcgtttctgggtgagcaaaaacaggaaggcaaaatgccgcaaaaaagggaataagggcgacacggaaatgttgaatactcatactcttcctttttcaatattattgaagcatttatcagggttattgtctcatgagcggatacatatttgaatgtatttagaaaaataaacaaataggggttccgcgcacatttccccgaaaagtgccagatacctgaaacaaaacccatcgtacggccaaggaagtctccaataactgtgatccaccacaagcgccagggttttcccagtcacgacgttgtaaaacgacggccagtcatgcataatccgcacgcatctggaataaggaagtgccattccgcctgacctttgcctatgaggaccaaaacgaaaaaacaccctttcgggtgtcttttctggaatttggtaccgagaggctccatgattcagtatgacttgcctttggtcgaaaaaaaaagcccgcactgtcaggtgcgggcttttttctgtgtttccttattaggacccactttcacatttaagttgtttttctaatccgcatatgatcaattcaaggccgaataagaaggctggctctgcaccttggtgatcaaataattcgatagcttgtcgtaataatggcggcatactatcagtagtaggtgtttccctttcttctttagcgacttgatgctcttgatcttccaatacgcaacctaaagtaaaatgccccacagcgctgagtgcatataatgcattctctagtgaaaaaccttgttggcataaaaaggctaattgattttcgagagtttcatactgtttttctgtaggccgtgtacctaaatgtacttttgctccatcgcgatgacttagtaaagcacatctaaaacttttagcgttattacgtaaaaaatcttgccagctttccccttctaaagggcaaaagtgagtatggtgcctatctaacatctcaatggctaaggcgtcgagcaaagcccgcttattttttacatgccaatacaatgtaggctgctctacacctagcttctgggcgagtttacgggttgttaaaccttcgattccgacctcattaagcagctctaatgcgctgttaatcactttacttttatctaatctggacatattcaccaccctgaattgactctcttccgggcgctatcatgccataccgcgaaaggttttgcgccattcgatggcgcgccgccattgcttgtgcaatgtacatcagagattttgagacacaaccaattattgaaggcctccctaacggggggcctttttttgtttctggtcccccgcttaacgatcgttggctgttttcagcaggacgcactgacctccctatcagtgatagagattgacatccctatcagtgatagagatactgagcacagctgtcaccggatgtgctttccggtctgatgagtccgtgaggacgaaacagcctctacaaataattttgtttaaatcacacgggtaaggaggtatttaaatgaaaacactgtcccaagcacagtcgaagacgagtagccagcagttttctttcaccggtaattctagcgctaacgtgattatcggcaaccagaaactaactatcaacgacgtcgcccgcgttgctcggaacgggaccttagtaagcctgactaacaacactgatatacttcaaggcattcaggcgtcctgtgattatatcaataacgcagttgagtctggtgaaccaatttacggtgtgacctcaggcttcggcggtatggcgaacgttgctatcagccgtgaacaggcctccgaactgcaaaaaaatttggtatggtttctgaaaactggtgctgggaacaaactccctttggcggacgtacgtgcagcaatgctgctgcgcgccaactcgcatatgcgtggcgcgtccggtatccgtctggagctgatcaaacgtatggaaatcttcttgaacgctggtgttactccgtacgtttatgaatttggatctatcggcgcttctggagatctggtcccgctgagctacattacgggttccctgattggccttgacccgagcttcaaggtggatttcaacggcaaagaaatggacgccccgaccgcgttacgccagttaaatctgtctcccctgacacttctgcctaaagaaggtctagctatgatgaatgggacctcagtcatgactggcatcgcagctaactgcgtatacgacacccagatcctgactgcgattgcaatgggtgttcacgctctggatatccaggccctgaacggcaccaaccagtctttccacccgtttatccataactctaagccgcacccaggtcagctgtgggcggctgatcagatgatatcattgctggctaactcgcaactggtacgggacgagctggacggcaaacatgattaccgcgaccacgagctgatccaggatcgttatagcctgcgttgccttccgcagtacctgggtccgattgtggacggtatctcacagatagcaaaacaaatcgaaattgaaattaactccgttactgataaccctctgattgacgtcgataaccaggcgtcgtaccacggcggaaatttcctgggtcagtatgttggcatgggtatggaccaccttcgctactatatcggcctgctggcgaaacacctggatgtgcagattgcgctgctagctagtcccgaatttagcaacggactgccgccatctttattgggcaaccgtgaacgtaaggttaacatgggtctgaaaggtttacaaatctgtggcaattccatcatgccgctgctgacgttctacggcaatagcatcgccgaccgctttccgacccatgcagagcaattcaaccagaatatcaactctcagggctacacctccgcaacgctggcgcgacgtagtgttgatatcttccaaaactacgttgcgattgccctgatgtttggcgtccaggctgtagacctgaggacttataaaaagactggccattacgatgcgcgtgcttgcctctctccggctaccgaacgcctgtattccgccgtgcgtcacgtagttggtcagaaacctacttcagatcgcccatacatctggaacgataacgagcagggtctggatgaacacatcgctcgcatctccgctgacattgccgctggcggagtaattgttcaagctgtacaggatatcctgccgtgcctgcactaaccggcttatcggtcagtttcacctgatttacgtaaaaacccgcttcggcgggtttttgcttttggaggggcagaaagatgaatgactgtccacgacgctatacccaaaagaaa

SEQ ID NO: 201 - DNA, 5122 bp, synthetic construct
  source 1..5122: mol_type = other DNA
aggctaggtggaggctcagtgatgataagtctgcgatggtggatgcatgtgtcatggtcatagctgtttcctgtgtgaaattgttatccgctcagagggcacaatcctattccgcgctatccgacaatctccaagacattaggtggagttcagttcggcgagcggaaatggcttacgaacggggcggagatttcctggaagatgccaggaagatacttaacagggaagtgagagggccgcggcaaagccgtttttccataggctccgcccccctgacaagcatcacgaaatctgacgctcaaatcagtggtggcgaaacccgacaggactataaagataccaggcgtttccccctggcggctccctcgtgcgctctcctgttcctgcctttcggtttaccggtgtcattccgctgttatggccgcgtttgtctcattccacgcctgacactcagttccgggtaggcagttcgctccaagctggactgtatgcacgaaccccccgttcagtccgaccgctgcgccttatccggtaactatcgtcttgagtccaacccggaaagacatgcaaaagcaccactggcagcagccactggtaattgatttagaggagttagtcttgaagtcatgcgccggttaaggctaaactgaaaggacaagttttggtgactgcgctcctccaagccagttacctcggttcaaagagttggtagctcagagaaccttcgaaaaaccgccctgcaaggcggttttttcgttttcagagcaagagattacgcgcagaccaaaacgatctcaagaagatcatcttattaagtctgacgctctattcaacaaagccgccgtccatgggtagggggcttcaaatcgtcctcgtgataccaattcggagcctgcttttttgtacaaacttgttgataatggcaattcaaggatcttcacctagatccttttaaattaaaaatgaagttttaaatcaatctaaagtatatatgagtaaacttggtctgacagttaccaatgcttaatcagtgaggcacctatctcagcgatctgtctatttcgttcatccatagttgcctgactccccgtcgtgtagataactacgatacgggagggcttaccatctggccccagtgctgcaatgataccgcgagagccacgctcaccggctccagatttatcagcaataaaccagccagccggaagggccgagcgcagaagtggtcctgcaactttatccgcctccatccagtctattaattgttgccgggaagctagagtaagtagttcgccagttaatagtttgcgcaacgttgttgccattgctacaggcatcgtggtgtcacgctcgtcgtttggtatggcttcattcagctccggttcccaacgatcaaggcgagttacatgatcccccatgttgtgcaaaaaagcggttagctccttcggtcctccgatcgttgtcagaagtaagttggccgcagtgttatcactcatggttatggcagcactgcataattctcttactgtcatgccatccgtaagatgcttttctgtgactggtgagtactcaaccaagtcattctgagaatagtgtatgcggcgaccgagttgctcttgcccggcgtcaatacgggataataccgcgccacatagcagaactttaaaagtgctcatcattggaaaacgttcttcggggcgaaaactctcaaggatcttaccgctgttgagatccagttcgatgtaacccactcgtgcacccaactgatcttcagcatcttttactttcaccagcgtttctgggtgagcaaaaacaggaaggcaaaatgccgcaaaaaagggaataagggcgacacggaaatgttgaatactcatactcttcctttttcaatattattgaagcatttatcagggttattgtctcatgagcggatacatatttgaatgtatttagaaaaataaacaaataggggttccgcgcacatttccccgaaaagtgccagatacctgaaacaaaacccatcgtacggccaaggaagtctccaataactgtgatccaccacaagcgccagggttttcccagtcacgacgttgtaaaacgacggccagtcatgcataatccgcacgcatctggaataaggaagtgccattccgcctgacctttgcctatgaggaccaaaacgaaaaaacaccctttcgggtgtcttttctggaatttggtaccgagaggctccatgattcagtatgacttgcctttggtcgaaaaaaaaagcccgcactgtcaggtgcgggcttttttctgtgtttccttattaggacccactttcacatttaagttgtttttctaatccgcatatgatcaattcaaggccgaataagaaggctggctctgcaccttggtgatcaaataattcgatagcttgtcgtaataatggcggcatactatcagtagtaggtgtttccctttcttctttagcgacttgatgctcttgatcttccaatacgcaacctaaagtaaaatgccccacagcgctgagtgcatataatgcattctctagtgaaaaaccttgttggcataaaaaggctaattgattttcgagagtttcatactgtttttctgtaggccgtgtacctaaatgtacttttgctccatcgcgatgacttagtaaagcacatctaaaacttttagcgttattacgtaaaaaatcttgccagctttccccttctaaagggcaaaagtgagtatggtgcctatctaacatctcaatggctaaggcgtcgagcaaagcccgcttattttttacatgccaatacaatgtaggctgctctacacctagcttctgggcgagtttacgggttgttaaaccttcgattccgacctcattaagcagctctaatgcgctgttaatcactttacttttatctaatctggacatattcaccaccctgaattgactctcttccgggcgctatcatgccataccgcgaaaggttttgcgccattcgatggcgcgccgccattgcttgtgcaatgtacatcagagattttgagacacaaccaattattgaaggcctccctaacggggggcctttttttgtttctggtcccccgcttaacgatcgttggctgttttcagcaggacgcactgacctccctatcagtgatagagattgacatccctatcagtgatagagatactgagcacagctgtcaccggatgtgctttccggtctgatgagtccgtgaggacgaaacagcctctacaaataattttgtttaaatcacacgggtaaggaggtatttaaatgaaaacactgtcccaagcacagtcgaagacgagtagccagcagttttctttcaccggtaattctagcgctaacgtgattatcggcaaccagaaactaactatcaacgacgtcgcccgcgttgctcggaacgggaccttagtaagcctgactaacaacactgatatacttcaaggcattcaggcgtcctgtgattatatcaataacgcagttgagtctggtgaaccaatttacggtgtgacctcaggcttcggcggtatggcgaacgttgctatcagccgtgaacaggcctccgaactgcaagagaatatggtatggtttacgaaaactggtgctgggaacaaactccctttggcggacgtacgtgcagcaatgctgctgcgcgccaactcgcatatgcgtggcgcgtccggtatccgtctggagctgatcaaacgtatggaaatcttcttgaacgctggtgttactccgtacgtttatgaatttggatctatcggcgcttctggagatctggtcccgctgagctacattacgggttccctgattggccttgacccgagcttcaaggtggatttcaacggcaaagaaatggacgccccgaccgcgttacgccagttaaatctgtctcccctgacacttctgcctaaagaagcgctagctatgctcaatgggacctcagtcatgactggcatcgcagctaactgcgtatacgacacccagatcctgactgcgattgcaatgggtgttcacgctctggatatccaggccctgaacggcaccaaccagtctttccacccgtttatccataactctaagccgcacccaggtcagctgtgggcggctgatcagatgatatcattgctggctaactcgcaactggtacgggacgagctggacggcaaacatgattaccgcgaccacgagctgatccaggatcgttatagcctgcgttgccttccgcagtacctgggtccgattgtggacggtatctcacagatagcaaaacaaatcgaaattgaaattaactccgttactgataaccctctgattgacgtcgataaccaggcgtcgtaccacggcggaaatttcctgggtcagtatgttggcatgggtatggaccaccttcgctactatatcggcctgctggcgaaacacctggatgtgcagattgcgctgctagctagtcccgaatttagcaacggactgccgccatctttattgggcaaccgtgaacgtaaggttaacatgggtctgaaaggtttacaaatctgtggcaattccatcatgccgctgctgacgttctacggcaatagcatcgccgaccgctttccgacccatgcagagcaattcaaccagaatatcaactctcagggctacacctccgcaacgctggcgcgacgtagtgttgatatcttccaaaactacgttgcgattgccctgatgtttggcgtccaggctgtagacctgaggacttataaaaagactggccattacgatgcgcgtgcttgcctctctccggctaccgaacgcctgtattccgccgtgcgtcacgtagttggtcagaaacctacttcagatcgcccatacatctggaacgataacgagcagggtctggatgaacacatcgctcgcatctccgctgacattgccgctggcggagtaattgttcaagctgtacaggatatcctgccgtgcctgcactaaccggcttatcggtcagtttcacctgatttacgtaaaaacccgcttcggcgggtttttgcttttggaggggcagaaagatgaatgactgtccacgacgctatacccaaaagaaa

SEQ ID NO: 202 - DNA, 5122 bp, synthetic construct
  source 1..5122: mol_type = other DNA
aggctaggtggaggctcagtgatgataagtctgcgatggtggatgcatgtgtcatggtcatagctgtttcctgtgtgaaattgttatccgctcagagggcacaatcctattccgcgctatccgacaatctccaagacattaggtggagttcagttcggcgagcggaaatggcttacgaacggggcggagatttcctggaagatgccaggaagatacttaacagggaagtgagagggccgcggcaaagccgtttttccataggctccgcccccctgacaagcatcacgaaatctgacgctcaaatcagtggtggcgaaacccgacaggactataaagataccaggcgtttccccctggcggctccctcgtgcgctctcctgttcctgcctttcggtttaccggtgtcattccgctgttatggccgcgtttgtctcattccacgcctgacactcagttccgggtaggcagttcgctccaagctggactgtatgcacgaaccccccgttcagtccgaccgctgcgccttatccggtaactatcgtcttgagtccaacccggaaagacatgcaaaagcaccactggcagcagccactggtaattgatttagaggagttagtcttgaagtcatgcgccggttaaggctaaactgaaaggacaagttttggtgactgcgctcctccaagccagttacctcggttcaaagagttggtagctcagagaaccttcgaaaaaccgccctgcaaggcggttttttcgttttcagagcaagagattacgcgcagaccaaaacgatctcaagaagatcatcttattaagtctgacgctctattcaacaaagccgccgtccatgggtagggggcttcaaatcgtcctcgtgataccaattcggagcctgcttttttgtacaaacttgttgataatggcaattcaaggatcttcacctagatccttttaaattaaaaatgaagttttaaatcaatctaaagtatatatgagtaaacttggtctgacagttaccaatgcttaatcagtgaggcacctatctcagcgatctgtctatttcgttcatccatagttgcctgactccccgtcgtgtagataactacgatacgggagggcttaccatctggccccagtgctgcaatgataccgcgagagccacgctcaccggctccagatttatcagcaataaaccagccagccggaagggccgagcgcagaagtggtcctgcaactttatccgcctccatccagtctattaattgttgccgggaagctagagtaagtagttcgccagttaatagtttgcgcaacgttgttgccattgctacaggcatcgtggtgtcacgctcgtcgtttggtatggcttcattcagctccggttcccaacgatcaaggcgagttacatgatcccccatgttgtgcaaaaaagcggttagctccttcggtcctccgatcgttgtcagaagtaagttggccgcagtgttatcactcatggttatggcagcactgcataattctcttactgtcatgccatccgtaagatgcttttctgtgactggtgagtactcaaccaagtcattctgagaatagtgtatgcggcgaccgagttgctcttgcccggcgtcaatacgggataataccgcgccacatagcagaactttaaaagtgctcatcattggaaaacgttcttcggggcgaaaactctcaaggatcttaccgctgttgagatccagttcgatgtaacccactcgtgcacccaactgatcttcagcatcttttactttcaccagcgtttctgggtgagcaaaaacaggaaggcaaaatgccgcaaaaaagggaataagggcgacacggaaatgttgaatactcatactcttcctttttcaatattattgaagcatttatcagggttattgtctcatgagcggatacatatttgaatgtatttagaaaaataaacaaataggggttccgcgcacatttccccgaaaagtgccagatacctgaaacaaaacccatcgtacggccaaggaagtctccaataactgtgatccaccacaagcgccagggttttcccagtcacgacgttgtaaaacgacggccagtcatgcataatccgcacgcatctggaataaggaagtgccattccgcctgacctttgcctatgaggaccaaaacgaaaaaacaccctttcgggtgtcttttctggaatttggtaccgagaggctccatgattcagtatgacttgcctttggtcgaaaaaaaaagcccgcactgtcaggtgcgggcttttttctgtgtttccttattaggacccactttcacatttaagttgtttttctaatccgcatatgatcaattcaaggccgaataagaaggctggctctgcaccttggtgatcaaataattcgatagcttgtcgtaataatggcggcatactatcagtagtaggtgtttccctttcttctttagcgacttgatgctcttgatcttccaatacgcaacctaaagtaaaatgccccacagcgctgagtgcatataatgcattctctagtgaaaaaccttgttggcataaaaaggctaattgattttcgagagtttcatactgtttttctgtaggccgtgtacctaaatgtacttttgctccatcgcgatgacttagtaaagcacatctaaaacttttagcgttattacgtaaaaaatcttgccagctttccccttctaaagggcaaaagtgagtatggtgcctatctaacatctcaatggctaaggcgtcgagcaaagcccgcttattttttacatgccaatacaatgtaggctgctctacacctagcttctgggcgagtttacgggttgttaaaccttcgattccgacctcattaagcagctctaatgcgctgttaatcactttacttttatctaatctggacatattcaccaccctgaattgactctcttccgggcgctatcatgccataccgcgaaaggttttgcgccattcgatggcgcgccgccattgcttgtgcaatgtacatcagagattttgagacacaaccaattattgaaggcctccctaacggggggcctttttttgtttctggtcccccgcttaacgatcgttggctgttttcagcaggacgcactgacctccctatcagtgatagagattgacatccctatcagtgatagagatactgagcacagctgtcaccggatgtgctttccggtctgatgagtccgtgaggacgaaacagcctctacaaataattttgtttaaatcacacgggtaaggaggtatttaaatgaaaacactgtcccaagcacagtcgaagacgagtagccagcagttttctttcaccggtaattctagcgctaacgtgattatcggcaaccagaaactaactatcaacgacgtcgcccgcgttgctcggaacgggaccttagtaagcctgactaacaacactgatatacttcaaggcattcaggcgtcctgtgattatatcaataacgcagttgagtctggtgaaccaatttacggtgtgacctcaggcttcggcggtatggcgaacgttgctatcagccgtgaacaggcctccgaactgcaaagtaatttggtatggtttctgaaaactggtgctgggaacaaactccctttggcggacgtacgtgcagcaatgctgctgcgcgccaactcgcatatgcgtggcgcgtccggtatccgtctggagctgatcaaacgtatggaaatcttcttgaacgctggtgttactccgtacgtttatgaatttggatctatcggcgcttctggagatctggtcccgctgagctacattacgggttccctgattggccttgacccgagcttcaaggtggatttcaacggcaaagaaatggacgccccgaccgcgttacgccagttaaatctgtctcccctgacacttctgcctaaagaaggtctagctatgctcaatgggacctcagtcatgactggcatcgcagctaactgcgtatacgacacccagatcctgactgcgattgcaatgggtgttcacgctctggatatccaggccctgaacggcaccaaccagtctttccacccgtttatccataactctaagccgcacccaggtcagctgtgggcggctgatcagatgatatcattgctggctaactcgcaactggtacgggacgagctggacggcaaacatgattaccgcgaccacgagctgatccaggatcgttatagcctgcgttgccttccgcagtacctgggtccgattgtggacggtatctcacagatagcaaaacaaatcgaaattgaaattaactccgttactgataaccctctgattgacgtcgataaccaggcgtcgtaccacggcggaaatttcctgggtcagtatgttggcatgggtatggaccaccttcgctactatatcggcctgctggcgaaacacctggatgtgcagattgcgctgctagctagtcccgaatttagcaacggactgccgccatctttattgggcaaccgtgaacgtaaggttaacatgggtctgaaaggtttacaaatctgtggcaattccatcatgccgctgctgacgttctacggcaatagcatcgccgaccgctttccgacccatgcagagcaattcaaccagaatatcaactctcagggctacacctccgcaacgctggcgcgacgtagtgttgatatcttccaaaactacgttgcgattgccctgatgtttggcgtccaggctgtagacctgaggacttataaaaagactggccattacgatgcgcgtgcttgcctctctccggctaccgaacgcctgtattccgccgtgcgtcacgtagttggtcagaaacctacttcagatcgcccatacatctggaacgataacgagcagggtctggatgaacacatcgctcgcatctccgctgacattgccgctggcggagtaattgttcaagctgtacaggatatcctgccgtgcctgcactaaccggcttatcggtcagtttcacctgatttacgtaaaaacccgcttcggcgggtttttgcttttggaggggcagaaagatgaatgactgtccacgacgctatacccaaaagaaa

SEQ ID NO: 203 - DNA, 5122 bp, synthetic construct
  source 1..5122: mol_type = other DNA
aggctaggtggaggctcagtgatgataagtctgcgatggtggatgcatgtgtcatggtcatagctgtttcctgtgtgaaattgttatccgctcagagggcacaatcctattccgcgctatccgacaatctccaagacattaggtggagttcagttcggcgagcggaaatggcttacgaacggggcggagatttcctggaagatgccaggaagatacttaacagggaagtgagagggccgcggcaaagccgtttttccataggctccgcccccctgacaagcatcacgaaatctgacgctcaaatcagtggtggcgaaacccgacaggactataaagataccaggcgtttccccctggcggctccctcgtgcgctctcctgttcctgcctttcggtttaccggtgtcattccgctgttatggccgcgtttgtctcattccacgcctgacactcagttccgggtaggcagttcgctccaagctggactgtatgcacgaaccccccgttcagtccgaccgctgcgccttatccggtaactatcgtcttgagtccaacccggaaagacatgcaaaagcaccactggcagcagccactggtaattgatttagaggagttagtcttgaagtcatgcgccggttaaggctaaactgaaaggacaagttttggtgactgcgctcctccaagccagttacctcggttcaaagagttggtagctcagagaaccttcgaaaaaccgccctgcaaggcggttttttcgttttcagagcaagagattacgcgcagaccaaaacgatctcaagaagatcatcttattaagtctgacgctctattcaacaaagccgccgtccatgggtagggggcttcaaatcgtcctcgtgataccaattcggagcctgcttttttgtacaaacttgttgataatggcaattcaaggatcttcacctagatccttttaaattaaaaatgaagttttaaatcaatctaaagtatatatgagtaaacttggtctgacagttaccaatgcttaatcagtgaggcacctatctcagcgatctgtctatttcgttcatccatagttgcctgactccccgtcgtgtagataactacgatacgggagggcttaccatctggccccagtgctgcaatgataccgcgagagccacgctcaccggctccagatttatcagcaataaaccagccagccggaagggccgagcgcagaagtggtcctgcaactttatccgcctccatccagtctattaattgttgccgggaagctagagtaagtagttcgccagttaatagtttgcgcaacgttgttgccattgctacaggcatcgtggtgtcacgctcgtcgtttggtatggcttcattcagctccggttcccaacgatcaaggcgagttacatgatcccccatgttgtgcaaaaaagcggttagctccttcggtcctccgatcgttgtcagaagtaagttggccgcagtgttatcactcatggttatggcagcactgcataattctcttactgtcatgccatccgtaagatgcttttctgtgactggtgagtactcaaccaagtcattctgagaatagtgtatgcggcgaccgagttgctcttgcccggcgtcaatacgggataataccgcgccacatagcagaactttaaaagtgctcatcattggaaaacgttcttcggggcgaaaactctcaaggatcttaccgctgttgagatccagttcgatgtaacccactcgtgcacccaactgatcttcagcatcttttactttcaccagcgtttctgggtgagcaaaaacaggaaggcaaaatgccgcaaaaaagggaataagggcgacacggaaatgttgaatactcatactcttcctttttcaatattattgaagcatttatcagggttattgtctcatgagcggatacatatttgaatgtatttagaaaaataaacaaataggggttccgcgcacatttccccgaaaagtgccagatacctgaaacaaaacccatcgtacggccaaggaagtctccaataactgtgatccaccacaagcgccagggttttcccagtcacgacgttgtaaaacgacggccagtcatgcataatccgcacgcatctggaataaggaagtgccattccgcctgacctttgcctatgaggaccaaaacgaaaaaacaccctttcgggtgtcttttctggaatttggtaccgagaggctccatgattcagtatgacttgcctttggtcgaaaaaaaaagcccgcactgtcaggtgcgggcttttttctgtgtttccttattaggacccactttcacatttaagttgtttttctaatccgcatatgatcaattcaaggccgaataagaaggctggctctgcaccttggtgatcaaataattcgatagcttgtcgtaataatggcggcatactatcagtagtaggtgtttccctttcttctttagcgacttgatgctcttgatcttccaatacgcaacctaaagtaaaatgccccacagcgctgagtgcatataatgcattctctagtgaaaaaccttgttggcataaaaaggctaattgattttcgagagtttcatactgtttttctgtaggccgtgtacctaaatgtacttttgctccatcgcgatgacttagtaaagcacatctaaaacttttagcgttattacgtaaaaaatcttgccagctttccccttctaaagggcaaaagtgagtatggtgcctatctaacatctcaatggctaaggcgtcgagcaaagcccgcttattttttacatgccaatacaatgtaggctgctctacacctagcttctgggcgagtttacgggttgttaaaccttcgattccgacctcattaagcagctctaatgcgctgttaatcactttacttttatctaatctggacatattcaccaccctgaattgactctcttccgggcgctatcatgccataccgcgaaaggttttgcgccattcgatggcgcgccgccattgcttgtgcaatgtacatcagagattttgagacacaaccaattattgaaggcctccctaacggggggcctttttttgtttctggtcccccgcttaacgatcgttggctgttttcagcaggacgcactgacctccctatcagtgatagagattgacatccctatcagtgatagagatactgagcacagctgtcaccggatgtgctttccggtctgatgagtccgtgaggacgaaacagcctctacaaataattttgtttaaatcacacgggtaaggaggtatttaaatgaaaacactgtcccaagcacagtcgaagacgagtagccagcagttttctttcaccggtaattctagcgctaacgtgattatcggcaaccagaaactaactatcaacgacgtcgcccgcgttgctcggaacgggaccttagtaagcctgactaacaacactgatatacttcaaggcattcaggcgtcctgtgattatatcaataacgcagttgagtctggtgaaccaatttacggtgtgacctcaggcttcggcggtatggcgaacgttgctatcagccgtgaacaggcctccgaactgcaacataatatggtatggtttctgaaaactggtgctgggaacaaactccctttggcggacgtacgtgcagcaatgctgctgcgcgccaactcgcatatgcgtggcgcgtccggtatccgtctggagctgatcaaacgtatggaaatcttcttgaacgctggtgttactccgtacgtttatgaatttggatctatcggcgcttctggagatctggtcccgctgagctacattacgggttccctgattggccttgacccgagcttcaaggtggatttcaacggcaaagaaatggacgccccgaccgcgttacgccagttaaatctgtctcccctgacacttctgcctaaagaaggtattgctatgatgaatgggacctcagtcatgactggcatcgcagctaactgcgtatacgacacccagatcctgactgcgattgcaatgggtgttcacgctctggatatccaggccctgaacggcaccaaccagtctttccacccgtttatccataactctaagccgcacccaggtcagctgtgggcggctgatcagatgatatcattgctggctaactcgcaactggtacgggacgagctggacggcaaacatgattaccgcgaccacgagctgatccaggatcgttatagcctgcgttgccttccgcagtacctgggtccgattgtggacggtatctcacagatagcaaaacaaatcgaaattgaaattaactccgttactgataaccctctgattgacgtcgataaccaggcgtcgtaccacggcggaaatttcctgggtcagtatgttggcatgggtatggaccaccttcgctactatatcggcctgctggcgaaacacctggatgtgcagattgcgctgctagctagtcccgaatttagcaacggactgccgccatctttattgggcaaccgtgaacgtaaggttaacatgggtctgaaaggtttacaaatctgtggcaattccatcatgccgctgctgacgttctacggcaatagcatcgccgaccgctttccgacccatgcagagcaattcaaccagaatatcaactctcagggctacacctccgcaacgctggcgcgacgtagtgttgatatcttccaaaactacgttgcgattgccctgatgtttggcgtccaggctgtagacctgaggacttataaaaagactggccattacgatgcgcgtgcttgcctctctccggctaccgaacgcctgtattccgccgtgcgtcacgtagttggtcagaaacctacttcagatcgcccatacatctggaacgataacgagcagggtctggatgaacacatcgctcgcatctccgctgacattgccgctggcggagtaattgttcaagctgtacaggatatcctgccgtgcctgcactaaccggcttatcggtcagtttcacctgatttacgtaaaaacccgcttcggcgggtttttgcttttggaggggcagaaagatgaatgactgtccacgacgctatacccaaaagaaa

SEQ ID NO: 204 - DNA, 5122 bp, synthetic construct
  source 1..5122: mol_type = other DNA
aggctaggtggaggctcagtgatgataagtctgcgatggtggatgcatgtgtcatggtcatagctgtttcctgtgtgaaattgttatccgctcagagggcacaatcctattccgcgctatccgacaatctccaagacattaggtggagttcagttcggcgagcggaaatggcttacgaacggggcggagatttcctggaagatgccaggaagatacttaacagggaagtgagagggccgcggcaaagccgtttttccataggctccgcccccctgacaagcatcacgaaatctgacgctcaaatcagtggtggcgaaacccgacaggactataaagataccaggcgtttccccctggcggctccctcgtgcgctctcctgttcctgcctttcggtttaccggtgtcattccgctgttatggccgcgtttgtctcattccacgcctgacactcagttccgggtaggcagttcgctccaagctggactgtatgcacgaaccccccgttcagtccgaccgctgcgccttatccggtaactatcgtcttgagtccaacccggaaagacatgcaaaagcaccactggcagcagccactggtaattgatttagaggagttagtcttgaagtcatgcgccggttaaggctaaactgaaaggacaagttttggtgactgcgctcctccaagccagttacctcggttcaaagagttggtagctcagagaaccttcgaaaaaccgccctgcaaggcggttttttcgttttcagagcaagagattacgcgcagaccaaaacgatctcaagaagatcatcttattaagtctgacgctctattcaacaaagccgccgtccatgggtagggggcttcaaatcgtcctcgtgataccaattcggagcctgcttttttgtacaaacttgttgataatggcaattcaaggatcttcacctagatccttttaaattaaaaatgaagttttaaatcaatctaaagtatatatgagtaaacttggtctgacagttaccaatgcttaatcagtgaggcacctatctcagcgatctgtctatttcgttcatccatagttgcctgactccccgtcgtgtagataactacgatacgggagggcttaccatctggccccagtgctgcaatgataccgcgagagccacgctcaccggctccagatttatcagcaataaaccagccagccggaagggccgagcgcagaagtggtcctgcaactttatccgcctccatccagtctattaattgttgccgggaagctagagtaagtagttcgccagttaatagtttgcgcaacgttgttgccattgctacaggcatcgtggtgtcacgctcgtcgtttggtatggcttcattcagctccggttcccaacgatcaaggcgagttacatgatcccccatgttgtgcaaaaaagcggttagctccttcggtcctccgatcgttgtcagaagtaagttggccgcagtgttatcactcatggttatggcagcactgcataattctcttactgtcatgccatccgtaagatgcttttctgtgactggtgagtactcaaccaagtcattctgagaatagtgtatgcggcgaccgagttgctcttgcccggcgtcaatacgggataataccgcgccacatagcagaactttaaaagtgctcatcattggaaaacgttcttcggggcgaaaactctcaaggatcttaccgctgttgagatccagttcgatgtaacccactcgtgcacccaactgatcttcagcatcttttactttcaccagcgtttctgggtgagcaaaaacaggaaggcaaaatgccgcaaaaaagggaataagggcgacacggaaatgttgaatactcatactcttcctttttcaatattattgaagcatttatcagggttattgtctcatgagcggatacatatttgaatgtatttagaaaaataaacaaataggggttccgcgcacatttccccgaaaagtgccagatacctgaaacaaaacccatcgtacggccaaggaagtctccaataactgtgatccaccacaagcgccagggttttcccagtcacgacgttgtaaaacgacggccagtcatgcataatccgcacgcatctggaataaggaagtgccattccgcctgacctttgcctatgaggaccaaaacgaaaaaacaccctttcgggtgtcttttctggaatttggtaccgagaggctccatgattcagtatgacttgcctttggtcgaaaaaaaaagcccgcactgtcaggtgcgggcttttttctgtgtttccttattaggacccactttcacatttaagttgtttttctaatccgcatatgatcaattcaaggccgaataagaaggctggctctgcaccttggtgatcaaataattcgatagcttgtcgtaataatggcggcatactatcagtagtaggtgtttccctttcttctttagcgacttgatgctcttgatcttccaatacgcaacctaaagtaaaatgccccacagcgctgagtgcatataatgcattctctagtgaaaaaccttgttggcataaaaaggctaattgattttcgagagtttcatactgtttttctgtaggccgtgtacctaaatgtacttttgctccatcgcgatgacttagtaaagcacatctaaaacttttagcgttattacgtaaaaaatcttgccagctttccccttctaaagggcaaaagtgagtatggtgcctatctaacatctcaatggctaaggcgtcgagcaaagcccgcttattttttacatgccaatacaatgtaggctgctctacacctagcttctgggcgagtttacgggttgttaaaccttcgattccgacctcattaagcagctctaatgcgctgttaatcactttacttttatctaatctggacatattcaccaccctgaattgactctcttccgggcgctatcatgccataccgcgaaaggttttgcgccattcgatggcgcgccgccattgcttgtgcaatgtacatcagagattttgagacacaaccaattattgaaggcctccctaacggggggcctttttttgtttctggtcccccgcttaacgatcgttggctgttttcagcaggacgcactgacctccctatcagtgatagagattgacatccctatcagtgatagagatactgagcacagctgtcaccggatgtgctttccggtctgatgagtccgtgaggacgaaacagcctctacaaataattttgtttaaatcacacgggtaaggaggtatttaaatgaaaacactgtcccaagcacagtcgaagacgagtagccagcagttttctttcaccggtaattctagcgctaacgtgattatcggcaaccagaaactaactatcaacgacgtcgcccgcgttgctcggaacgggaccttagtaagcctgactaacaacactgatatacttcaaggcattcaggcgtcctgtgattatatcaataacgcagttgagtctggtgaaccaatttacggtgtgacctcaggcttcggcggtatggcgaacgttgctatcagccgtgaacaggcctccgaactgcaacacaatatggtatggtttaccaaaactggtgctgggaacaaactccctttggcggacgtacgtgcagcaatgctgctgcgcgccaactcgcatatgcgtggcgcgtccggtatccgtctggagctgatcaaacgtatggaaatcttcttgaacgctggtgttactccgtacgtttatgaatttggatctatcggcgcttctggagatctggtcccgctgagctacattacgggttccctgattggccttgacccgagcttcaaggtggatttcaacggcaaagaaatggacgccccgaccgcgttacgccagttaaatctgtctcccctgacacttctgcctaaagaagcgctagctatggtgaatgggacctcagtcatgactggcatcgcagctaactgcgtatacgacacccagatcctgactgcgattgcaatgggtgttcacgctctggatatccaggccctgaacggcaccaaccagtctttccacccgtttatccataactctaagccgcacccaggtcagctgtgggcggctgatcagatgatatcattgctggctaactcgcaactggtacgggacgagctggacggcaaacatgattaccgcgaccacgagctgatccaggatcgttatagcctgcgttgccttccgcagtacctgggtccgattgtggacggtatctcacagatagcaaaacaaatcgaaattgaaattaactccgttactgataaccctctgattgacgtcgataaccaggcgtcgtaccacggcggaaatttcctgggtcagtatgttggcatgggtatggaccaccttcgctactatatcggcctgctggcgaaacacctggatgtgcagattgcgctgctagctagtcccgaatttagcaacggactgccgccatctttattgggcaaccgtgaacgtaaggttaacatgggtctgaaaggtttacaaatctgtggcaattccatcatgccgctgctgacgttctacggcaatagcatcgccgaccgctttccgacccatgcagagcaattcaaccagaatatcaactctcagggctacacctccgcaacgctggcgcgacgtagtgttgatatcttccaaaactacgttgcgattgccctgatgtttggcgtccaggctgtagacctgaggacttataaaaagactggccattacgatgcgcgtgcttgcctctctccggctaccgaacgcctgtattccgccgtgcgtcacgtagttggtcagaaacctacttcagatcgcccatacatctggaacgataacgagcagggtctggatgaacacatcgctcgcatctccgctgacattgccgctggcggagtaattgttcaagctgtacaggatatcctgccgtgcctgcactaaccggcttatcggtcagtttcacctgatttacgtaaaaacccgcttcggcgggtttttgcttttggaggggcagaaagatgaatgactgtccacgacgctatacccaaaagaaa

SEQ ID NO: 205 - DNA, 5122 bp, synthetic construct
  source 1..5122: mol_type = other DNA
aggctaggtggaggctcagtgatgataagtctgcgatggtggatgcatgtgtcatggtcatagctgtttcctgtgtgaaattgttatccgctcagagggcacaatcctattccgcgctatccgacaatctccaagacattaggtggagttcagttcggcgagcggaaatggcttacgaacggggcggagatttcctggaagatgccaggaagatacttaacagggaagtgagagggccgcggcaaagccgtttttccataggctccgcccccctgacaagcatcacgaaatctgacgctcaaatcagtggtggcgaaacccgacaggactataaagataccaggcgtttccccctggcggctccctcgtgcgctctcctgttcctgcctttcggtttaccggtgtcattccgctgttatggccgcgtttgtctcattccacgcctgacactcagttccgggtaggcagttcgctccaagctggactgtatgcacgaaccccccgttcagtccgaccgctgcgccttatccggtaactatcgtcttgagtccaacccggaaagacatgcaaaagcaccactggcagcagccactggtaattgatttagaggagttagtcttgaagtcatgcgccggttaaggctaaactgaaaggacaagttttggtgactgcgctcctccaagccagttacctcggttcaaagagttggtagctcagagaaccttcgaaaaaccgccctgcaaggcggttttttcgttttcagagcaagagattacgcgcagaccaaaacgatctcaagaagatcatcttattaagtctgacgctctattcaacaaagccgccgtccatgggtagggggcttcaaatcgtcctcgtgataccaattcggagcctgcttttttgtacaaacttgttgataatggcaattcaaggatcttcacctagatccttttaaattaaaaatgaagttttaaatcaatctaaagtatatatgagtaaacttggtctgacagttaccaatgcttaatcagtgaggcacctatctcagcgatctgtctatttcgttcatccatagttgcctgactccccgtcgtgtagataactacgatacgggagggcttaccatctggccccagtgctgcaatgataccgcgagagccacgctcaccggctccagatttatcagcaataaaccagccagccggaagggccgagcgcagaagtggtcctgcaactttatccgcctccatccagtctattaattgttgccgggaagctagagtaagtagttcgccagttaatagtttgcgcaacgttgttgccattgctacaggcatcgtggtgtcacgctcgtcgtttggtatggcttcattcagctccggttcccaacgatcaaggcgagttacatgatcccccatgttgtgcaaaaaagcggttagctccttcggtcctccgatcgttgtcagaagtaagttggccgcagtgttatcactcatggttatggcagcactgcataattctcttactgtcatgccatccgtaagatgcttttctgtgactggtgagtactcaaccaagtcattctgagaatagtgtatgcggcgaccgagttgctcttgcccggcgtcaatacgggataataccgcgccacatagcagaactttaaaagtgctcatcattggaaaacgttcttcggggcgaaaactctcaaggatcttaccgctgttgagatccagttcgatgtaacccactcgtgcacccaactgatcttcagcatcttttactttcaccagcgtttctgggtgagcaaaaacaggaaggcaaaatgccgcaaaaaagggaataagggcgacacggaaatgttgaatactcatactcttcctttttcaatattattgaagcatttatcagggttattgtctcatgagcggatacatatttgaatgtatttagaaaaataaacaaataggggttccgcgcacatttccccgaaaagtgccagatacctgaaacaaaacccatcgtacggccaaggaagtctccaataactgtgatccaccacaagcgccagggttttcccagtcacgacgttgtaaaacgacggccagtcatgcataatccgcacgcatctggaataaggaagtgccattccgcctgacctttgcctatgaggaccaaaacgaaaaaacaccctttcgggtgtcttttctggaatttggtaccgagaggctccatgattcagtatgacttgcctttggtcgaaaaaaaaagcccgcactgtcaggtgcgggcttttttctgtgtttccttattaggacccactttcacatttaagttgtttttctaatccgcatatgatcaattcaaggccgaataagaaggctggctctgcaccttggtgatcaaataattcgatagcttgtcgtaataatggcggcatactatcagtagtaggtgtttccctttcttctttagcgacttgatgctcttgatcttccaatacgcaacctaaagtaaaatgccccacagcgctgagtgcatataatgcattctctagtgaaaaaccttgttggcataaaaaggctaattgattttcgagagtttcatactgtttttctgtaggccgtgtacctaaatgtacttttgctccatcgcgatgacttagtaaagcacatctaaaacttttagcgttattacgtaaaaaatcttgccagctttccccttctaaagggcaaaagtgagtatggtgcctatctaacatctcaatggctaaggcgtcgagcaaagcccgcttattttttacatgccaatacaatgtaggctgctctacacctagcttctgggcgagtttacgggttgttaaaccttcgattccgacctcattaagcagctctaatgcgctgttaatcactttacttttatctaatctggacatattcaccaccctgaattgactctcttccgggcgctatcatgccataccgcgaaaggttttgcgccattcgatggcgcgccgccattgcttgtgcaatgtacatcagagattttgagacacaaccaattattgaaggcctccctaacggggggcctttttttgtttctggtcccccgcttaacgatcgttggctgttttcagcaggacgcactgacctccctatcagtgatagagattgacatccctatcagtgatagagatactgagcacagctgtcaccggatgtgctttccggtctgatgagtccgtgaggacgaaacagcctctacaaataattttgtttaaatcacacgggtaaggaggtatttaaatgaaaacactgtcccaagcacagtcgaagacgagtagccagcagttttctttcaccggtaattctagcgctaacgtgattatcggcaaccagaaactaactatcaacgacgtcgcccgcgttgctcggaacgggaccttagtaagcctgactaacaacactgatatacttcaaggcattcaggcgtcctgtgattatatcaataacgcagttgagtctggtgaaccaatttacggtgtgacctcaggcttcggcggtatggcgaacgttgctatcagccgtgaacaggcctccgaactgcaaaaaaatttggtatggtttctgaaaactggtgctgggaacaaactccctttggcggacgtacgtgcagcaatgctgctgcgcgccaactcgcatatgcgtggcgcgtccggtatccgtctggagctgatcaaacgtatggaaatcttcttgaacgctggtgttactccgtacgtttatgaatttggatctatcggcgcttctggagatctggtcccgctgagctacattacgggttccctgattggccttgacccgagcttcaaggtggatttcaacggcaaagaaatggacgccccgaccgcgttacgccagttaaatctgtctcccctgacacttctgcctaaagaagctctagctatgatgaatgggacctcagtcatgactggcatcgcagctaactgcgtatacgacacccagatcctgactgcgattgcaatgggtgttcacgctctggatatccaggccctgaacggcaccaaccagtctttccacccgtttatccataactctaagccgcacccaggtcagctgtgggcggctgatcagatgatatcattgctggctaactcgcaactggtacgggacgagctggacggcaaacatgattaccgcgaccacgagctgatccaggatcgttatagcctgcgttgccttccgcagtacctgggtccgattgtggacggtatctcacagatagcaaaacaaatcgaaattgaaattaactccgttactgataaccctctgattgacgtcgataaccaggcgtcgtaccacggcggaaatttcctgggtcagtatgttggcatgggtatggaccaccttcgctactatatcggcctgctggcgaaacacctggatgtgcagattgcgctgctagctagtcccgaatttagcaacggactgccgccatctttattgggcaaccgtgaacgtaaggttaacatgggtctgaaaggtttacaaatctgtggcaattccatcatgccgctgctgacgttctacggcaatagcatcgccgaccgctttccgacccatgcagagcaattcaaccagaatatcaactctcagggctacacctccgcaacgctggcgcgacgtagtgttgatatcttccaaaactacgttgcgattgccctgatgtttggcgtccaggctgtagacctgaggacttataaaaagactggccattacgatgcgcgtgcttgcctctctccggctaccgaacgcctgtattccgccgtgcgtcacgtagttggtcagaaacctacttcagatcgcccatacatctggaacgataacgagcagggtctggatgaacacatcgctcgcatctccgctgacattgccgctggcggagtaattgttcaagctgtacaggatatcctgccgtgcctgcactaaccggcttatcggtcagtttcacctgatttacgtaaaaacccgcttcggcgggtttttgcttttggaggggcagaaagatgaatgactgtccacgacgctatacccaaaagaaa

SEQ ID NO: 206 - DNA, 5122 bp, synthetic construct
  source 1..5122: mol_type = other DNA
aggctaggtggaggctcagtgatgataagtctgcgatggtggatgcatgtgtcatggtcatagctgtttcctgtgtgaaattgttatccgctcagagggcacaatcctattccgcgctatccgacaatctccaagacattaggtggagttcagttcggcgagcggaaatggcttacgaacggggcggagatttcctggaagatgccaggaagatacttaacagggaagtgagagggccgcggcaaagccgtttttccataggctccgcccccctgacaagcatcacgaaatctgacgctcaaatcagtggtggcgaaacccgacaggactataaagataccaggcgtttccccctggcggctccctcgtgcgctctcctgttcctgcctttcggtttaccggtgtcattccgctgttatggccgcgtttgtctcattccacgcctgacactcagttccgggtaggcagttcgctccaagctggactgtatgcacgaaccccccgttcagtccgaccgctgcgccttatccggtaactatcgtcttgagtccaacccggaaagacatgcaaaagcaccactggcagcagccactggtaattgatttagaggagttagtcttgaagtcatgcgccggttaaggctaaactgaaaggacaagttttggtgactgcgctcctccaagccagttacctcggttcaaagagttggtagctcagagaaccttcgaaaaaccgccctgcaaggcggttttttcgttttcagagcaagagattacgcgcagaccaaaacgatctcaagaagatcatcttattaagtctgacgctctattcaacaaagccgccgtccatgggtagggggcttcaaatcgtcctcgtgataccaattcggagcctgcttttttgtacaaacttgttgataatggcaattcaaggatcttcacctagatccttttaaattaaaaatgaagttttaaatcaatctaaagtatatatgagtaaacttggtctgacagttaccaatgcttaatcagtgaggcacctatctcagcgatctgtctatttcgttcatccatagttgcctgactccccgtcgtgtagataactacgatacgggagggcttaccatctggccccagtgctgcaatgataccgcgagagccacgctcaccggctccagatttatcagcaataaaccagccagccggaagggccgagcgcagaagtggtcctgcaactttatccgcctccatccagtctattaattgttgccgggaagctagagtaagtagttcgccagttaatagtttgcgcaacgttgttgccattgctacaggcatcgtggtgtcacgctcgtcgtttggtatggcttcattcagctccggttcccaacgatcaaggcgagttacatgatcccccatgttgtgcaaaaaagcggttagctccttcggtcctccgatcgttgtcagaagtaagttggccgcagtgttatcactcatggttatggcagcactgcataattctcttactgtcatgccatccgtaagatgcttttctgtgactggtgagtactcaaccaagtcattctgagaatagtgtatgcggcgaccgagttgctcttgcccggcgtcaatacgggataataccgcgccacatagcagaactttaaaagtgctcatcattggaaaacgttcttcggggcgaaaactctcaaggatcttaccgctgttgagatccagttcgatgtaacccactcgtgcacccaactgatcttcagcatcttttactttcaccagcgtttctgggtgagcaaaaacaggaaggcaaaatgccgcaaaaaagggaataagggcgacacggaaatgttgaatactcatactcttcctttttcaatattattgaagcatttatcagggttattgtctcatgagcggatacatatttgaatgtatttagaaaaataaacaaataggggttccgcgcacatttccccgaaaagtgccagatacctgaaacaaaacccatcgtacggccaaggaagtctccaataactgtgatccaccacaagcgccagggttttcccagtcacgacgttgtaaaacgacggccagtcatgcataatccgcacgcatctggaataaggaagtgccattccgcctgacctttgcctatgaggaccaaaacgaaaaaacaccctttcgggtgtcttttctggaatttggtaccgagaggctccatgattcagtatgacttgcctttggtcgaaaaaaaaagcccgcactgtcaggtgcgggcttttttctgtgtttccttattaggacccactttcacatttaagttgtttttctaatccgcatatgatcaattcaaggccgaataagaaggctggctctgcaccttggtgatcaaataattcgatagcttgtcgtaataatggcggcatactatcagtagtaggtgtttccctttcttctttagcgacttgatgctcttgatcttccaatacgcaacctaaagtaaaatgccccacagcgctgagtgcatataatgcattctctagtgaaaaaccttgttggcataaaaaggctaattgattttcgagagtttcatactgtttttctgtaggccgtgtacctaaatgtacttttgctccatcgcgatgacttagtaaagcacatctaaaacttttagcgttattacgtaaaaaatcttgccagctttccccttctaaagggcaaaagtgagtatggtgcctatctaacatctcaatggctaaggcgtcgagcaaagcccgcttattttttacatgccaatacaatgtaggctgctctacacctagcttctgggcgagtttacgggttgttaaaccttcgattccgacctcattaagcagctctaatgcgctgttaatcactttacttttatctaatctggacatattcaccaccctgaattgactctcttccgggcgctatcatgccataccgcgaaaggttttgcgccattcgatggcgcgccgccattgcttgtgcaatgtacatcagagattttgagacacaaccaattattgaaggcctccctaacggggggcctttttttgtttctggtcccccgcttaacgatcgttggctgttttcagcaggacgcactgacctccctatcagtgatagagattgacatccctatcagtgatagagatactgagcacagctgtcaccggatgtgctttccggtctgatgagtccgtgaggacgaaacagcctctacaaataattttgtttaaatcacacgggtaaggaggtatttaaatgaaaacactgtcccaagcacagtcgaagacgagtagccagcagttttctttcaccggtaattctagcgctaacgtgattatcggcaaccagaaactaactatcaacgacgtcgcccgcgttgctcggaacgggaccttagtaagcctgactaacaacactgatatacttcaaggcattcaggcgtcctgtgattatatcaataacgcagttgagtctggtgaaccaatttacggtgtgacctcaggcttcggcggtatggcgaacgttgctatcagccgtgaacaggcctccgaactgcaatcgaatttggtatggtttaccaaaactggtgctgggaacaaactccctttggcggacgtacgtgcagcaatgctgctgcgcgccaactcgcatatgcgtggcgcgtccggtatccgtctggagctgatcaaacgtatggaaatcttcttgaacgctggtgttactccgtacgtttatgaatttggatctatcggcgcttctggagatctggtcccgctgagctacattacgggttccctgattggccttgacccgagcttcaaggtggatttcaacggcaaagaaatggacgccccgaccgcgttacgccagttaaatctgtctcccctgacacttctgcctaaagaaagtctagctatgctcaatgggacctcagtcatgactggcatcgcagctaactgcgtatacgacacccagatcctgactgcgattgcaatgggtgttcacgctctggatatccaggccctgaacggcaccaaccagtctttccacccgtttatccataactctaagccgcacccaggtcagctgtgggcggctgatcagatgatatcattgctggctaactcgcaactggtacgggacgagctggacggcaaacatgattaccgcgaccacgagctgatccaggatcgttatagcctgcgttgccttccgcagtacctgggtccgattgtggacggtatctcacagatagcaaaacaaatcgaaattgaaattaactccgttactgataaccctctgattgacgtcgataaccaggcgtcgtaccacggcggaaatttcctgggtcagtatgttggcatgggtatggaccaccttcgctactatatcggcctgctggcgaaacacctggatgtgcagattgcgctgctagctagtcccgaatttagcaacggactgccgccatctttattgggcaaccgtgaacgtaaggttaacatgggtctgaaaggtttacaaatctgtggcaattccatcatgccgctgctgacgttctacggcaatagcatcgccgaccgctttccgacccatgcagagcaattcaaccagaatatcaactctcagggctacacctccgcaacgctggcgcgacgtagtgttgatatcttccaaaactacgttgcgattgccctgatgtttggcgtccaggctgtagacctgaggacttataaaaagactggccattacgatgcgcgtgcttgcctctctccggctaccgaacgcctgtattccgccgtgcgtcacgtagttggtcagaaacctacttcagatcgcccatacatctggaacgataacgagcagggtctggatgaacacatcgctcgcatctccgctgacattgccgctggcggagtaattgttcaagctgtacaggatatcctgccgtgcctgcactaaccggcttatcggtcagtttcacctgatttacgtaaaaacccgcttcggcgggtttttgcttttggaggggcagaaagatgaatgactgtccacgacgctatacccaaaagaaa

SEQ ID NO: 207 - DNA, 5122 bp, synthetic construct
  source 1..5122: mol_type = other DNA
aggctaggtggaggctcagtgatgataagtctgcgatggtggatgcatgtgtcatggtcatagctgtttcctgtgtgaaattgttatccgctcagagggcacaatcctattccgcgctatccgacaatctccaagacattaggtggagttcagttcggcgagcggaaatggcttacgaacggggcggagatttcctggaagatgccaggaagatacttaacagggaagtgagagggccgcggcaaagccgtttttccataggctccgcccccctgacaagcatcacgaaatctgacgctcaaatcagtggtggcgaaacccgacaggactataaagataccaggcgtttccccctggcggctccctcgtgcgctctcctgttcctgcctttcggtttaccggtgtcattccgctgttatggccgcgtttgtctcattccacgcctgacactcagttccgggtaggcagttcgctccaagctggactgtatgcacgaaccccccgttcagtccgaccgctgcgccttatccggtaactatcgtcttgagtccaacccggaaagacatgcaaaagcaccactggcagcagccactggtaattgatttagaggagttagtcttgaagtcatgcgccggttaaggctaaactgaaaggacaagttttggtgactgcgctcctccaagccagttacctcggttcaaagagttggtagctcagagaaccttcgaaaaaccgccctgcaaggcggttttttcgttttcagagcaagagattacgcgcagaccaaaacgatctcaagaagatcatcttattaagtctgacgctctattcaacaaagccgccgtccatgggtagggggcttcaaatcgtcctcgtgataccaattcggagcctgcttttttgtacaaacttgttgataatggcaattcaaggatcttcacctagatccttttaaattaaaaatgaagttttaaatcaatctaaagtatatatgagtaaacttggtctgacagttaccaatgcttaatcagtgaggcacctatctcagcgatctgtctatttcgttcatccatagttgcctgactccccgtcgtgtagataactacgatacgggagggcttaccatctggccccagtgctgcaatgataccgcgagagccacgctcaccggctccagatttatcagcaataaaccagccagccggaagggccgagcgcagaagtggtcctgcaactttatccgcctccatccagtctattaattgttgccgggaagctagagtaagtagttcgccagttaatagtttgcgcaacgttgttgccattgctacaggcatcgtggtgtcacgctcgtcgtttggtatggcttcattcagctccggttcccaacgatcaaggcgagttacatgatcccccatgttgtgcaaaaaagcggttagctccttcggtcctccgatcgttgtcagaagtaagttggccgcagtgttatcactcatggttatggcagcactgcataattctcttactgtcatgccatccgtaagatgcttttctgtgactggtgagtactcaaccaagtcattctgagaatagtgtatgcggcgaccgagttgctcttgcccggcgtcaatacgggataataccgcgccacatagcagaactttaaaagtgctcatcattggaaaacgttcttcggggcgaaaactctcaaggatcttaccgctgttgagatccagttcgatgtaacccactcgtgcacccaactgatcttcagcatcttttactttcaccagcgtttctgggtgagcaaaaacaggaaggcaaaatgccgcaaaaaagggaataagggcgacacggaaatgttgaatactcatactcttcctttttcaatattattgaagcatttatcagggttattgtctcatgagcggatacatatttgaatgtatttagaaaaataaacaaataggggttccgcgcacatttccccgaaaagtgccagatacctgaaacaaaacccatcgtacggccaaggaagtctccaataactgtgatccaccacaagcgccagggttttcccagtcacgacgttgtaaaacgacggccagtcatgcataatccgcacgcatctggaataaggaagtgccattccgcctgacctttgcctatgaggaccaaaacgaaaaaacaccctttcgggtgtcttttctggaatttggtaccgagaggctccatgattcagtatgacttgcctttggtcgaaaaaaaaagcccgcactgtcaggtgcgggcttttttctgtgtttccttattaggacccactttcacatttaagttgtttttctaatccgcatatgatcaattcaaggccgaataagaaggctggctctgcaccttggtgatcaaataattcgatagcttgtcgtaataatggcggcatactatcagtagtaggtgtttccctttcttctttagcgacttgatgctcttgatcttccaatacgcaacctaaagtaaaatgccccacagcgctgagtgcatataatgcattctctagtgaaaaaccttgttggcataaaaaggctaattgattttcgagagtttcatactgtttttctgtaggccgtgtacctaaatgtacttttgctccatcgcgatgacttagtaaagcacatctaaaacttttagcgttattacgtaaaaaatcttgccagctttccccttctaaagggcaaaagtgagtatggtgcctatctaacatctcaatggctaaggcgtcgagcaaagcccgcttattttttacatgccaatacaatgtaggctgctctacacctagcttctgggcgagtttacgggttgttaaaccttcgattccgacctcattaagcagctctaatgcgctgttaatcactttacttttatctaatctggacatattcaccaccctgaattgactctcttccgggcgctatcatgccataccgcgaaaggttttgcgccattcgatggcgcgccgccattgcttgtgcaatgtacatcagagattttgagacacaaccaattattgaaggcctccctaacggggggcctttttttgtttctggtcccccgcttaacgatcgttggctgttttcagcaggacgcactgacctccctatcagtgatagagattgacatccctatcagtgatagagatactgagcacagctgtcaccggatgtgctttccggtctgatgagtccgtgaggacgaaacagcctctacaaataattttgtttaaatcacacgggtaaggaggtatttaaatgaaaacactgtcccaagcacagtcgaagacgagtagccagcagttttctttcaccggtaattctagcgctaacgtgattatcggcaaccagaaactaactatcaacgacgtcgcccgcgttgctcggaacgggaccttagtaagcctgactaacaacactgatatacttcaaggcattcaggcgtcctgtgattatatcaataacgcagttgagtctggtgaaccaatttacggtgtgacctcaggcttcggcggtatggcgaacgttgctatcagccgtgaacaggcctccgaactgcaagagaatttggtatggtttacgaaaactggtgctgggaacaaactccctttggcggacgtacgtgcagcaatgctgctgcgcgccaactcgcatatgcgtggcgcgtccggtatccgtctggagctgatcaaacgtatggaaatcttcttgaacgctggtgttactccgtacgtttatgaatttggatctatcggcgcttctggagatctggtcccgctgagctacattacgggttccctgattggccttgacccgagcttcaaggtggatttcaacggcaaagaaatggacgccccgaccgcgttacgccagttaaatctgtctcccctgacacttctgcctaaagaaggtctagctatgattaatgggacctcagtcatgactggcatcgcagctaactgcgtatacgacacccagatcctgactgcgattgcaatgggtgttcacgctctggatatccaggccctgaacggcaccaaccagtctttccacccgtttatccataactctaagccgcacccaggtcagctgtgggcggctgatcagatgatatcattgctggctaactcgcaactggtacgggacgagctggacggcaaacatgattaccgcgaccacgagctgatccaggatcgttatagcctgcgttgccttccgcagtacctgggtccgattgtggacggtatctcacagatagcaaaacaaatcgaaattgaaattaactccgttactgataaccctctgattgacgtcgataaccaggcgtcgtaccacggcggaaatttcctgggtcagtatgttggcatgggtatggaccaccttcgctactatatcggcctgctggcgaaacacctggatgtgcagattgcgctgctagctagtcccgaatttagcaacggactgccgccatctttattgggcaaccgtgaacgtaaggttaacatgggtctgaaaggtttacaaatctgtggcaattccatcatgccgctgctgacgttctacggcaatagcatcgccgaccgctttccgacccatgcagagcaattcaaccagaatatcaactctcagggctacacctccgcaacgctggcgcgacgtagtgttgatatcttccaaaactacgttgcgattgccctgatgtttggcgtccaggctgtagacctgaggacttataaaaagactggccattacgatgcgcgtgcttgcctctctccggctaccgaacgcctgtattccgccgtgcgtcacgtagttggtcagaaacctacttcagatcgcccatacatctggaacgataacgagcagggtctggatgaacacatcgctcgcatctccgctgacattgccgctggcggagtaattgttcaagctgtacaggatatcctgccgtgcctgcactaaccggcttatcggtcagtttcacctgatttacgtaaaaacccgcttcggcgggtttttgcttttggaggggcagaaagatgaatgactgtccacgacgctatacccaaaagaaa

SEQ ID NO: 208 - DNA, 5122 bp, synthetic construct
  source 1..5122: mol_type = other DNA
aggctaggtggaggctcagtgatgataagtctgcgatggtggatgcatgtgtcatggtcatagctgtttcctgtgtgaaattgttatccgctcagagggcacaatcctattccgcgctatccgacaatctccaagacattaggtggagttcagttcggcgagcggaaatggcttacgaacggggcggagatttcctggaagatgccaggaagatacttaacagggaagtgagagggccgcggcaaagccgtttttccataggctccgcccccctgacaagcatcacgaaatctgacgctcaaatcagtggtggcgaaacccgacaggactataaagataccaggcgtttccccctggcggctccctcgtgcgctctcctgttcctgcctttcggtttaccggtgtcattccgctgttatggccgcgtttgtctcattccacgcctgacactcagttccgggtaggcagttcgctccaagctggactgtatgcacgaaccccccgttcagtccgaccgctgcgccttatccggtaactatcgtcttgagtccaacccggaaagacatgcaaaagcaccactggcagcagccactggtaattgatttagaggagttagtcttgaagtcatgcgccggttaaggctaaactgaaaggacaagttttggtgactgcgctcctccaagccagttacctcggttcaaagagttggtagctcagagaaccttcgaaaaaccgccctgcaaggcggttttttcgttttcagagcaagagattacgcgcagaccaaaacgatctcaagaagatcatcttattaagtctgacgctctattcaacaaagccgccgtccatgggtagggggcttcaaatcgtcctcgtgataccaattcggagcctgcttttttgtacaaacttgttgataatggcaattcaaggatcttcacctagatccttttaaattaaaaatgaagttttaaatcaatctaaagtatatatgagtaaacttggtctgacagttaccaatgcttaatcagtgaggcacctatctcagcgatctgtctatttcgttcatccatagttgcctgactccccgtcgtgtagataactacgatacgggagggcttaccatctggccccagtgctgcaatgataccgcgagagccacgctcaccggctccagatttatcagcaataaaccagccagccggaagggccgagcgcagaagtggtcctgcaactttatccgcctccatccagtctattaattgttgccgggaagctagagtaagtagttcgccagttaatagtttgcgcaacgttgttgccattgctacaggcatcgtggtgtcacgctcgtcgtttggtatggcttcattcagctccggttcccaacgatcaaggcgagttacatgatcccccatgttgtgcaaaaaagcggttagctccttcggtcctccgatcgttgtcagaagtaagttggccgcagtgttatcactcatggttatggcagcactgcataattctcttactgtcatgccatccgtaagatgcttttctgtgactggtgagtactcaaccaagtcattctgagaatagtgtatgcggcgaccgagttgctcttgcccggcgtcaatacgggataataccgcgccacatagcagaactttaaaagtgctcatcattggaaaacgttcttcggggcgaaaactctcaaggatcttaccgctgttgagatccagttcgatgtaacccactcgtgcacccaactgatcttcagcatcttttactttcaccagcgtttctgggtgagcaaaaacaggaaggcaaaatgccgcaaaaaagggaataagggcgacacggaaatgttgaatactcatactcttcctttttcaatattattgaagcatttatcagggttattgtctcatgagcggatacatatttgaatgtatttagaaaaataaacaaataggggttccgcgcacatttccccgaaaagtgccagatacctgaaacaaaacccatcgtacggccaaggaagtctccaataactgtgatccaccacaagcgccagggttttcccagtcacgacgttgtaaaacgacggccagtcatgcataatccgcacgcatctggaataaggaagtgccattccgcctgacctttgcctatgaggaccaaaacgaaaaaacaccctttcgggtgtcttttctggaatttggtaccgagaggctccatgattcagtatgacttgcctttggtcgaaaaaaaaagcccgcactgtcaggtgcgggcttttttctgtgtttccttattaggacccactttcacatttaagttgtttttctaatccgcatatgatcaattcaaggccgaataagaaggctggctctgcaccttggtgatcaaataattcgatagcttgtcgtaataatggcggcatactatcagtagtaggtgtttccctttcttctttagcgacttgatgctcttgatcttccaatacgcaacctaaagtaaaatgccccacagcgctgagtgcatataatgcattctctagtgaaaaaccttgttggcataaaaaggctaattgattttcgagagtttcatactgtttttctgtaggccgtgtacctaaatgtacttttgctccatcgcgatgacttagtaaagcacatctaaaacttttagcgttattacgtaaaaaatcttgccagctttccccttctaaagggcaaaagtgagtatggtgcctatctaacatctcaatggctaaggcgtcgagcaaagcccgcttattttttacatgccaatacaatgtaggctgctctacacctagcttctgggcgagtttacgggttgttaaaccttcgattccgacctcattaagcagctctaatgcgctgttaatcactttacttttatctaatctggacatattcaccaccctgaattgactctcttccgggcgctatcatgccataccgcgaaaggttttgcgccattcgatggcgcgccgccattgcttgtgcaatgtacatcagagattttgagacacaaccaattattgaaggcctccctaacggggggcctttttttgtttctggtcccccgcttaacgatcgttggctgttttcagcaggacgcactgacctccctatcagtgatagagattgacatccctatcagtgatagagatactgagcacagctgtcaccggatgtgctttccggtctgatgagtccgtgaggacgaaacagcctctacaaataattttgtttaaatcacacgggtaaggaggtatttaaatgaaaacactgtcccaagcacagtcgaagacgagtagccagcagttttctttcaccggtaattctagcgctaacgtgattatcggcaaccagaaactaactatcaacgacgtcgcccgcgttgctcggaacgggaccttagtaagcctgactaacaacactgatatacttcaaggcattcaggcgtcctgtgattatatcaataacgcagttgagtctggtgaaccaatttacggtgtgacctcaggcttcggcggtatggcgaacgttgctatcagccgtgaacaggcctccgaactgcaagagaatttggtatggtttctgaaaactggtgctgggaacaaactccctttggcggacgtacgtgcagcaatgctgctgcgcgccaactcgcatatgcgtggcgcgtccggtatccgtctggagctgatcaaacgtatggaaatcttcttgaacgctggtgttactccgtacgtttatgaatttggatctatcggcgcttctggagatctggtcccgctgagctacattacgggttccctgattggccttgacccgagcttcaaggtggatttcaacggcaaagaaatggacgccccgaccgcgttacgccagttaaatctgtctcccctgacacttctgcctaaagaatcgctagctatgatgaatgggacctcagtcatgactggcatcgcagctaactgcgtatacgacacccagatcctgactgcgattgcaatgggtgttcacgctctggatatccaggccctgaacggcaccaaccagtctttccacccgtttatccataactctaagccgcacccaggtcagctgtgggcggctgatcagatgatatcattgctggctaactcgcaactggtacgggacgagctggacggcaaacatgattaccgcgaccacgagctgatccaggatcgttatagcctgcgttgccttccgcagtacctgggtccgattgtggacggtatctcacagatagcaaaacaaatcgaaattgaaattaactccgttactgataaccctctgattgacgtcgataaccaggcgtcgtaccacggcggaaatttcctgggtcagtatgttggcatgggtatggaccaccttcgctactatatcggcctgctggcgaaacacctggatgtgcagattgcgctgctagctagtcccgaatttagcaacggactgccgccatctttattgggcaaccgtgaacgtaaggttaacatgggtctgaaaggtttacaaatctgtggcaattccatcatgccgctgctgacgttctacggcaatagcatcgccgaccgctttccgacccatgcagagcaattcaaccagaatatcaactctcagggctacacctccgcaacgctggcgcgacgtagtgttgatatcttccaaaactacgttgcgattgccctgatgtttggcgtccaggctgtagacctgaggacttataaaaagactggccattacgatgcgcgtgcttgcctctctccggctaccgaacgcctgtattccgccgtgcgtcacgtagttggtcagaaacctacttcagatcgcccatacatctggaacgataacgagcagggtctggatgaacacatcgctcgcatctccgctgacattgccgctggcggagtaattgttcaagctgtacaggatatcctgccgtgcctgcactaaccggcttatcggtcagtttcacctgatttacgtaaaaacccgcttcggcgggtttttgcttttggaggggcagaaagatgaatgactgtccacgacgctatacccaaaagaaa

SEQ ID NO: 209 - DNA, 5122 bp, synthetic construct
  source 1..5122: mol_type = other DNA
aggctaggtggaggctcagtgatgataagtctgcgatggtggatgcatgtgtcatggtcatagctgtttcctgtgtgaaattgttatccgctcagagggcacaatcctattccgcgctatccgacaatctccaagacattaggtggagttcagttcggcgagcggaaatggcttacgaacggggcggagatttcctggaagatgccaggaagatacttaacagggaagtgagagggccgcggcaaagccgtttttccataggctccgcccccctgacaagcatcacgaaatctgacgctcaaatcagtggtggcgaaacccgacaggactataaagataccaggcgtttccccctggcggctccctcgtgcgctctcctgttcctgcctttcggtttaccggtgtcattccgctgttatggccgcgtttgtctcattccacgcctgacactcagttccgggtaggcagttcgctccaagctggactgtatgcacgaaccccccgttcagtccgaccgctgcgccttatccggtaactatcgtcttgagtccaacccggaaagacatgcaaaagcaccactggcagcagccactggtaattgatttagaggagttagtcttgaagtcatgcgccggttaaggctaaactgaaaggacaagttttggtgactgcgctcctccaagccagttacctcggttcaaagagttggtagctcagagaaccttcgaaaaaccgccctgcaaggcggttttttcgttttcagagcaagagattacgcgcagaccaaaacgatctcaagaagatcatcttattaagtctgacgctctattcaacaaagccgccgtccatgggtagggggcttcaaatcgtcctcgtgataccaattcggagcctgcttttttgtacaaacttgttgataatggcaattcaaggatcttcacctagatccttttaaattaaaaatgaagttttaaatcaatctaaagtatatatgagtaaacttggtctgacagttaccaatgcttaatcagtgaggcacctatctcagcgatctgtctatttcgttcatccatagttgcctgactccccgtcgtgtagataactacgatacgggagggcttaccatctggccccagtgctgcaatgataccgcgagagccacgctcaccggctccagatttatcagcaataaaccagccagccggaagggccgagcgcagaagtggtcctgcaactttatccgcctccatccagtctattaattgttgccgggaagctagagtaagtagttcgccagttaatagtttgcgcaacgttgttgccattgctacaggcatcgtggtgtcacgctcgtcgtttggtatggcttcattcagctccggttcccaacgatcaaggcgagttacatgatcccccatgttgtgcaaaaaagcggttagctccttcggtcctccgatcgttgtcagaagtaagttggccgcagtgttatcactcatggttatggcagcactgcataattctcttactgtcatgccatccgtaagatgcttttctgtgactggtgagtactcaaccaagtcattctgagaatagtgtatgcggcgaccgagttgctcttgcccggcgtcaatacgggataataccgcgccacatagcagaactttaaaagtgctcatcattggaaaacgttcttcggggcgaaaactctcaaggatcttaccgctgttgagatccagttcgatgtaacccactcgtgcacccaactgatcttcagcatcttttactttcaccagcgtttctgggtgagcaaaaacaggaaggcaaaatgccgcaaaaaagggaataagggcgacacggaaatgttgaatactcatactcttcctttttcaatattattgaagcatttatcagggttattgtctcatgagcggatacatatttgaatgtatttagaaaaataaacaaataggggttccgcgcacatttccccgaaaagtgccagatacctgaaacaaaacccatcgtacggccaaggaagtctccaataactgtgatccaccacaagcgccagggttttcccagtcacgacgttgtaaaacgacggccagtcatgcataatccgcacgcatctggaataaggaagtgccattccgcctgacctttgcctatgaggaccaaaacgaaaaaacaccctttcgggtgtcttttctggaatttggtaccgagaggctccatgattcagtatgacttgcctttggtcgaaaaaaaaagcccgcactgtcaggtgcgggcttttttctgtgtttccttattaggacccactttcacatttaagttgtttttctaatccgcatatgatcaattcaaggccgaataagaaggctggctctgcaccttggtgatcaaataattcgatagcttgtcgtaataatggcggcatactatcagtagtaggtgtttccctttcttctttagcgacttgatgctcttgatcttccaatacgcaacctaaagtaaaatgccccacagcgctgagtgcatataatgcattctctagtgaaaaaccttgttggcataaaaaggctaattgattttcgagagtttcatactgtttttctgtaggccgtgtacctaaatgtacttttgctccatcgcgatgacttagtaaagcacatctaaaacttttagcgttattacgtaaaaaatcttgccagctttccccttctaaagggcaaaagtgagtatggtgcctatctaacatctcaatggctaaggcgtcgagcaaagcccgcttattttttacatgccaatacaatgtaggctgctctacacctagcttctgggcgagtttacgggttgttaaaccttcgattccgacctcattaagcagctctaatgcgctgttaatcactttacttttatctaatctggacatattcaccaccctgaattgactctcttccgggcgctatcatgccataccgcgaaaggttttgcgccattcgatggcgcgccgccattgcttgtgcaatgtacatcagagattttgagacacaaccaattattgaaggcctccctaacggggggcctttttttgtttctggtcccccgcttaacgatcgttggctgttttcagcaggacgcactgacctccctatcagtgatagagattgacatccctatcagtgatagagatactgagcacagctgtcaccggatgtgctttccggtctgatgagtccgtgaggacgaaacagcctctacaaataattttgtttaaatcacacgggtaaggaggtatttaaatgaaaacactgtcccaagcacagtcgaagacgagtagccagcagttttctttcaccggtaattctagcgctaacgtgattatcggcaaccagaaactaactatcaacgacgtcgcccgcgttgctcggaacgggaccttagtaagcctgactaacaacactgatatacttcaaggcattcaggcgtcctgtgattatatcaataacgcagttgagtctggtgaaccaatttacggtgtgacctcaggcttcggcggtatggcgaacgttgctatcagccgtgaacaggcctccgaactgcaaaagaatattgtatggtttacgaaaactggtgctgggaacaaactccctttggcggacgtacgtgcagcaatgctgctgcgcgccaactcgcatatgcgtggcgcgtccggtatccgtctggagctgatcaaacgtatggaaatcttcttgaacgctggtgttactccgtacgtttatgaatttggatctatcggcgcttctggagatctggtcccgctgagctacattacgggttccctgattggccttgacccgagcttcaaggtggatttcaacggcaaagaaatggacgccccgaccgcgttacgccagttaaatctgtctcccctgacacttctgcctaaagaaggtctagctatgctgaatgggacctcagtcatgactggcatcgcagctaactgcgtatacgacacccagatcctgactgcgattgcaatgggtgttcacgctctggatatccaggccctgaacggcaccaaccagtctttccacccgtttatccataactctaagccgcacccaggtcagctgtgggcggctgatcagatgatatcattgctggctaactcgcaactggtacgggacgagctggacggcaaacatgattaccgcgaccacgagctgatccaggatcgttatagcctgcgttgccttccgcagtacctgggtccgattgtggacggtatctcacagatagcaaaacaaatcgaaattgaaattaactccgttactgataaccctctgattgacgtcgataaccaggcgtcgtaccacggcggaaatttcctgggtcagtatgttggcatgggtatggaccaccttcgctactatatcggcctgctggcgaaacacctggatgtgcagattgcgctgctagctagtcccgaatttagcaacggactgccgccatctttattgggcaaccgtgaacgtaaggttaacatgggtctgaaaggtttacaaatctgtggcaattccatcatgccgctgctgacgttctacggcaatagcatcgccgaccgctttccgacccatgcagagcaattcaaccagaatatcaactctcagggctacacctccgcaacgctggcgcgacgtagtgttgatatcttccaaaactacgttgcgattgccctgatgtttggcgtccaggctgtagacctgaggacttataaaaagactggccattacgatgcgcgtgcttgcctctctccggctaccgaacgcctgtattccgccgtgcgtcacgtagttggtcagaaacctacttcagatcgcccatacatctggaacgataacgagcagggtctggatgaacacatcgctcgcatctccgctgacattgccgctggcggagtaattgttcaagctgtacaggatatcctgccgtgcctgcactaaccggcttatcggtcagtttcacctgatttacgtaaaaacccgcttcggcgggtttttgcttttggaggggcagaaagatgaatgactgtccacgacgctatacccaaaagaaa

SEQ ID NO: 210 - DNA, 5122 bp, synthetic construct
  source 1..5122: mol_type = other DNA
aggctaggtggaggctcagtgatgataagtctgcgatggtggatgcatgtgtcatggtcatagctgtttcctgtgtgaaattgttatccgctcagagggcacaatcctattccgcgctatccgacaatctccaagacattaggtggagttcagttcggcgagcggaaatggcttacgaacggggcggagatttcctggaagatgccaggaagatacttaacagggaagtgagagggccgcggcaaagccgtttttccataggctccgcccccctgacaagcatcacgaaatctgacgctcaaatcagtggtggcgaaacccgacaggactataaagataccaggcgtttccccctggcggctccctcgtgcgctctcctgttcctgcctttcggtttaccggtgtcattccgctgttatggccgcgtttgtctcattccacgcctgacactcagttccgggtaggcagttcgctccaagctggactgtatgcacgaaccccccgttcagtccgaccgctgcgccttatccggtaactatcgtcttgagtccaacccggaaagacatgcaaaagcaccactggcagcagccactggtaattgatttagaggagttagtcttgaagtcatgcgccggttaaggctaaactgaaaggacaagttttggtgactgcgctcctccaagccagttacctcggttcaaagagttggtagctcagagaaccttcgaaaaaccgccctgcaaggcggttttttcgttttcagagcaagagattacgcgcagaccaaaacgatctcaagaagatcatcttattaagtctgacgctctattcaacaaagccgccgtccatgggtagggggcttcaaatcgtcctcgtgataccaattcggagcctgcttttttgtacaaacttgttgataatggcaattcaaggatcttcacctagatccttttaaattaaaaatgaagttttaaatcaatctaaagtatatatgagtaaacttggtctgacagttaccaatgcttaatcagtgaggcacctatctcagcgatctgtctatttcgttcatccatagttgcctgactccccgtcgtgtagataactacgatacgggagggcttaccatctggccccagtgctgcaatgataccgcgagagccacgctcaccggctccagatttatcagcaataaaccagccagccggaagggccgagcgcagaagtggtcctgcaactttatccgcctccatccagtctattaattgttgccgggaagctagagtaagtagttcgccagttaatagtttgcgcaacgttgttgccattgctacaggcatcgtggtgtcacgctcgtcgtttggtatggcttcattcagctccggttcccaacgatcaaggcgagttacatgatcccccatgttgtgcaaaaaagcggttagctccttcggtcctccgatcgttgtcagaagtaagttggccgcagtgttatcactcatggttatggcagcactgcataattctcttactgtcatgccatccgtaagatgcttttctgtgactggtgagtactcaaccaagtcattctgagaatagtgtatgcggcgaccgagttgctcttgcccggcgtcaatacgggataataccgcgccacatagcagaactttaaaagtgctcatcattggaaaacgttcttcggggcgaaaactctcaaggatcttaccgctgttgagatccagttcgatgtaacccactcgtgcacccaactgatcttcagcatcttttactttcaccagcgtttctgggtgagcaaaaacaggaaggcaaaatgccgcaaaaaagggaataagggcgacacggaaatgttgaatactcatactcttcctttttcaatattattgaagcatttatcagggttattgtctcatgagcggatacatatttgaatgtatttagaaaaataaacaaataggggttccgcgcacatttccccgaaaagtgccagatacctgaaacaaaacccatcgtacggccaaggaagtctccaataactgtgatccaccacaagcgccagggttttcccagtcacgacgttgtaaaacgacggccagtcatgcataatccgcacgcatctggaataaggaagtgccattccgcctgacctttgcctatgaggaccaaaacgaaaaaacaccctttcgggtgtcttttctggaatttggtaccgagaggctccatgattcagtatgacttgcctttggtcgaaaaaaaaagcccgcactgtcaggtgcgggcttttttctgtgtttccttattaggacccactttcacatttaagttgtttttctaatccgcatatgatcaattcaaggccgaataagaaggctggctctgcaccttggtgatcaaataattcgatagcttgtcgtaataatggcggcatactatcagtagtaggtgtttccctttcttctttagcgacttgatgctcttgatcttccaatacgcaacctaaagtaaaatgccccacagcgctgagtgcatataatgcattctctagtgaaaaaccttgttggcataaaaaggctaattgattttcgagagtttcatactgtttttctgtaggccgtgtacctaaatgtacttttgctccatcgcgatgacttagtaaagcacatctaaaacttttagcgttattacgtaaaaaatcttgccagctttccccttctaaagggcaaaagtgagtatggtgcctatctaacatctcaatggctaaggcgtcgagcaaagcccgcttattttttacatgccaatacaatgtaggctgctctacacctagcttctgggcgagtttacgggttgttaaaccttcgattccgacctcattaagcagctctaatgcgctgttaatcactttacttttatctaatctggacatattcaccaccctgaattgactctcttccgggcgctatcatgccataccgcgaaaggttttgcgccattcgatggcgcgccgccattgcttgtgcaatgtacatcagagattttgagacacaaccaattattgaaggcctccctaacggggggcctttttttgtttctggtcccccgcttaacgatcgttggctgttttcagcaggacgcactgacctccctatcagtgatagagattgacatccctatcagtgatagagatactgagcacagctgtcaccggatgtgctttccggtctgatgagtccgtgaggacgaaacagcctctacaaataattttgtttaaatcacacgggtaaggaggtatttaaatgaaaacactgtcccaagcacagtcgaagacgagtagccagcagttttctttcaccggtaattctagcgctaacgtgattatcggcaaccagaaactaactatcaacgacgtcgcccgcgttgctcggaacgggaccttagtaagcctgactaacaacactgatatacttcaaggcattcaggcgtcctgtgattatatcaataacgcagttgagtctggtgaaccaatttacggtgtgacctcaggcttcggcggtatggcgaacgttgctatcagccgtgaacaggcctccgaactgcaaagtaatatggtatggtttatgaaaactggtgctgggaacaaactccctttggcggacgtacgtgcagcaatgctgctgcgcgccaactcgcatatgcgtggcgcgtccggtatccgtctggagctgatcaaacgtatggaaatcttcttgaacgctggtgttactccgtacgtttatgaatttggatctatcggcgcttctggagatctggtcccgctgagctacattacgggttccctgattggccttgacccgagcttcaaggtggatttcaacggcaaagaaatggacgccccgaccgcgttacgccagttaaatctgtctcccctgacacttctgcctaaagaaggtctagctatgatgaatgggacctcagtcatgactggcatcgcagctaactgcgtatacgacacccagatcctgactgcgattgcaatgggtgttcacgctctggatatccaggccctgaacggcaccaaccagtctttccacccgtttatccataactctaagccgcacccaggtcagctgtgggcggctgatcagatgatatcattgctggctaactcgcaactggtacgggacgagctggacggcaaacatgattaccgcgaccacgagctgatccaggatcgttatagcctgcgttgccttccgcagtacctgggtccgattgtggacggtatctcacagatagcaaaacaaatcgaaattgaaattaactccgttactgataaccctctgattgacgtcgataaccaggcgtcgtaccacggcggaaatttcctgggtcagtatgttggcatgggtatggaccaccttcgctactatatcggcctgctggcgaaacacctggatgtgcagattgcgctgctagctagtcccgaatttagcaacggactgccgccatctttattgggcaaccgtgaacgtaaggttaacatgggtctgaaaggtttacaaatctgtggcaattccatcatgccgctgctgacgttctacggcaatagcatcgccgaccgctttccgacccatgcagagcaattcaaccagaatatcaactctcagggctacacctccgcaacgctggcgcgacgtagtgttgatatcttccaaaactacgttgcgattgccctgatgtttggcgtccaggctgtagacctgaggacttataaaaagactggccattacgatgcgcgtgcttgcctctctccggctaccgaacgcctgtattccgccgtgcgtcacgtagttggtcagaaacctacttcagatcgcccatacatctggaacgataacgagcagggtctggatgaacacatcgctcgcatctccgctgacattgccgctggcggagtaattgttcaagctgtacaggatatcctgccgtgcctgcactaaccggcttatcggtcagtttcacctgatttacgtaaaaacccgcttcggcgggtttttgcttttggaggggcagaaagatgaatgactgtccacgacgctatacccaaaagaaa

SEQ ID NO: 211 - DNA, 5122 bp, synthetic construct
  source 1..5122: mol_type = other DNA
aggctaggtggaggctcagtgatgataagtctgcgatggtggatgcatgtgtcatggtcatagctgtttcctgtgtgaaattgttatccgctcagagggcacaatcctattccgcgctatccgacaatctccaagacattaggtggagttcagttcggcgagcggaaatggcttacgaacggggcggagatttcctggaagatgccaggaagatacttaacagggaagtgagagggccgcggcaaagccgtttttccataggctccgcccccctgacaagcatcacgaaatctgacgctcaaatcagtggtggcgaaacccgacaggactataaagataccaggcgtttccccctggcggctccctcgtgcgctctcctgttcctgcctttcggtttaccggtgtcattccgctgttatggccgcgtttgtctcattccacgcctgacactcagttccgggtaggcagttcgctccaagctggactgtatgcacgaaccccccgttcagtccgaccgctgcgccttatccggtaactatcgtcttgagtccaacccggaaagacatgcaaaagcaccactggcagcagccactggtaattgatttagaggagttagtcttgaagtcatgcgccggttaaggctaaactgaaaggacaagttttggtgactgcgctcctccaagccagttacctcggttcaaagagttggtagctcagagaaccttcgaaaaaccgccctgcaaggcggttttttcgttttcagagcaagagattacgcgcagaccaaaacgatctcaagaagatcatcttattaagtctgacgctctattcaacaaagccgccgtccatgggtagggggcttcaaatcgtcctcgtgataccaattcggagcctgcttttttgtacaaacttgttgataatggcaattcaaggatcttcacctagatccttttaaattaaaaatgaagttttaaatcaatctaaagtatatatgagtaaacttggtctgacagttaccaatgcttaatcagtgaggcacctatctcagcgatctgtctatttcgttcatccatagttgcctgactccccgtcgtgtagataactacgatacgggagggcttaccatctggccccagtgctgcaatgataccgcgagagccacgctcaccggctccagatttatcagcaataaaccagccagccggaagggccgagcgcagaagtggtcctgcaactttatccgcctccatccagtctattaattgttgccgggaagctagagtaagtagttcgccagttaatagtttgcgcaacgttgttgccattgctacaggcatcgtggtgtcacgctcgtcgtttggtatggcttcattcagctccggttcccaacgatcaaggcgagttacatgatcccccatgttgtgcaaaaaagcggttagctccttcggtcctccgatcgttgtcagaagtaagttggccgcagtgttatcactcatggttatggcagcactgcataattctcttactgtcatgccatccgtaagatgcttttctgtgactggtgagtactcaaccaagtcattctgagaatagtgtatgcggcgaccgagttgctcttgcccggcgtcaatacgggataataccgcgccacatagcagaactttaaaagtgctcatcattggaaaacgttcttcggggcgaaaactctcaaggatcttaccgctgttgagatccagttcgatgtaacccactcgtgcacccaactgatcttcagcatcttttactttcaccagcgtttctgggtgagcaaaaacaggaaggcaaaatgccgcaaaaaagggaataagggcgacacggaaatgttgaatactcatactcttcctttttcaatattattgaagcatttatcagggttattgtctcatgagcggatacatatttgaatgtatttagaaaaataaacaaataggggttccgcgcacatttccccgaaaagtgccagatacctgaaacaaaacccatcgtacggccaaggaagtctccaataactgtgatccaccacaagcgccagggttttcccagtcacgacgttgtaaaacgacggccagtcatgcataatccgcacgcatctggaataaggaagtgccattccgcctgacctttgcctatgaggaccaaaacgaaaaaacaccctttcgggtgtcttttctggaatttggtaccgagaggctccatgattcagtatgacttgcctttggtcgaaaaaaaaagcccgcactgtcaggtgcgggcttttttctgtgtttccttattaggacccactttcacatttaagttgtttttctaatccgcatatgatcaattcaaggccgaataagaaggctggctctgcaccttggtgatcaaataattcgatagcttgtcgtaataatggcggcatactatcagtagtaggtgtttccctttcttctttagcgacttgatgctcttgatcttccaatacgcaacctaaagtaaaatgccccacagcgctgagtgcatataatgcattctctagtgaaaaaccttgttggcataaaaaggctaattgattttcgagagtttcatactgtttttctgtaggccgtgtacctaaatgtacttttgctccatcgcgatgacttagtaaagcacatctaaaacttttagcgttattacgtaaaaaatcttgccagctttccccttctaaagggcaaaagtgagtatggtgcctatctaacatctcaatggctaaggcgtcgagcaaagcccgcttattttttacatgccaatacaatgtaggctgctctacacctagcttctgggcgagtttacgggttgttaaaccttcgattccgacctcattaagcagctctaatgcgctgttaatcactttacttttatctaatctggacatattcaccaccctgaattgactctcttccgggcgctatcatgccataccgcgaaaggttttgcgccattcgatggcgcgccgccattgcttgtgcaatgtacatcagagattttgagacacaaccaattattgaaggcctccctaacggggggcctttttttgtttctggtcccccgcttaacgatcgttggctgttttcagcaggacgcactgacctccctatcagtgatagagattgacatccctatcagtgatagagatactgagcacagctgtcaccggatgtgctttccggtctgatgagtccgtgaggacgaaacagcctctacaaataattttgtttaaatcacacgggtaaggaggtatttaaatgaaaacactgtcccaagcacagtcgaagacgagtagccagcagttttctttcaccggtaattctagcgctaacgtgattatcggcaaccagaaactaactatcaacgacgtcgcccgcgttgctcggaacgggaccttagtaagcctgactaacaacactgatatacttcaaggcattcaggcgtcctgtgattatatcaataacgcagttgagtctggtgaaccaatttacggtgtgacctcaggcttcggcggtatggcgaacgttgctatcagccgtgaacaggcctccgaactgcaaaagaatttggtatggtttctgaaaactggtgctgggaacaaactccctttggcggacgtacgtgcagcaatgctgctgcgcgccaactcgcatatgcgtggcgcgtccggtatccgtctggagctgatcaaacgtatggaaatcttcttgaacgctggtgttactccgtacgtttatgaatttggatctatcggcgcttctggagatctggtcccgctgagctacattacgggttccctgattggccttgacccgagcttcaaggtggatttcaacggcaaagaaatggacgccccgaccgcgttacgccagttaaatctgtctcccctgacacttctgcctaaagaagccctagctatgacgaatgggacctcagtcatgactggcatcgcagctaactgcgtatacgacacccagatcctgactgcgattgcaatgggtgttcacgctctggatatccaggccctgaacggcaccaaccagtctttccacccgtttatccataactctaagccgcacccaggtcagctgtgggcggctgatcagatgatatcattgctggctaactcgcaactggtacgggacgagctggacggcaaacatgattaccgcgaccacgagctgatccaggatcgttatagcctgcgttgccttccgcagtacctgggtccgattgtggacggtatctcacagatagcaaaacaaatcgaaattgaaattaactccgttactgataaccctctgattgacgtcgataaccaggcgtcgtaccacggcggaaatttcctgggtcagtatgttggcatgggtatggaccaccttcgctactatatcggcctgctggcgaaacacctggatgtgcagattgcgctgctagctagtcccgaatttagcaacggactgccgccatctttattgggcaaccgtgaacgtaaggttaacatgggtctgaaaggtttacaaatctgtggcaattccatcatgccgctgctgacgttctacggcaatagcatcgccgaccgctttccgacccatgcagagcaattcaaccagaatatcaactctcagggctacacctccgcaacgctggcgcgacgtagtgttgatatcttccaaaactacgttgcgattgccctgatgtttggcgtccaggctgtagacctgaggacttataaaaagactggccattacgatgcgcgtgcttgcctctctccggctaccgaacgcctgtattccgccgtgcgtcacgtagttggtcagaaacctacttcagatcgcccatacatctggaacgataacgagcagggtctggatgaacacatcgctcgcatctccgctgacattgccgctggcggagtaattgttcaagctgtacaggatatcctgccgtgcctgcactaaccggcttatcggtcagtttcacctgatttacgtaaaaacccgcttcggcgggtttttgcttttggaggggcagaaagatgaatgactgtccacgacgctatacccaaaagaaa

SEQ ID NO: 212 - DNA, 5122 bp, synthetic construct
  source 1..5122: mol_type = other DNA
aggctaggtggaggctcagtgatgataagtctgcgatggtggatgcatgtgtcatggtcatagctgtttcctgtgtgaaattgttatccgctcagagggcacaatcctattccgcgctatccgacaatctccaagacattaggtggagttcagttcggcgagcggaaatggcttacgaacggggcggagatttcctggaagatgccaggaagatacttaacagggaagtgagagggccgcggcaaagccgtttttccataggctccgcccccctgacaagcatcacgaaatctgacgctcaaatcagtggtggcgaaacccgacaggactataaagataccaggcgtttccccctggcggctccctcgtgcgctctcctgttcctgcctttcggtttaccggtgtcattccgctgttatggccgcgtttgtctcattccacgcctgacactcagttccgggtaggcagttcgctccaagctggactgtatgcacgaaccccccgttcagtccgaccgctgcgccttatccggtaactatcgtcttgagtccaacccggaaagacatgcaaaagcaccactggcagcagccactggtaattgatttagaggagttagtcttgaagtcatgcgccggttaaggctaaactgaaaggacaagttttggtgactgcgctcctccaagccagttacctcggttcaaagagttggtagctcagagaaccttcgaaaaaccgccctgcaaggcggttttttcgttttcagagcaagagattacgcgcagaccaaaacgatctcaagaagatcatcttattaagtctgacgctctattcaacaaagccgccgtccatgggtagggggcttcaaatcgtcctcgtgataccaattcggagcctgcttttttgtacaaacttgttgataatggcaattcaaggatcttcacctagatccttttaaattaaaaatgaagttttaaatcaatctaaagtatatatgagtaaacttggtctgacagttaccaatgcttaatcagtgaggcacctatctcagcgatctgtctatttcgttcatccatagttgcctgactccccgtcgtgtagataactacgatacgggagggcttaccatctggccccagtgctgcaatgataccgcgagagccacgctcaccggctccagatttatcagcaataaaccagccagccggaagggccgagcgcagaagtggtcctgcaactttatccgcctccatccagtctattaattgttgccgggaagctagagtaagtagttcgccagttaatagtttgcgcaacgttgttgccattgctacaggcatcgtggtgtcacgctcgtcgtttggtatggcttcattcagctccggttcccaacgatcaaggcgagttacatgatcccccatgttgtgcaaaaaagcggttagctccttcggtcctccgatcgttgtcagaagtaagttggccgcagtgttatcactcatggttatggcagcactgcataattctcttactgtcatgccatccgtaagatgcttttctgtgactggtgagtactcaaccaagtcattctgagaatagtgtatgcggcgaccgagttgctcttgcccggcgtcaatacgggataataccgcgccacatagcagaactttaaaagtgctcatcattggaaaacgttcttcggggcgaaaactctcaaggatcttaccgctgttgagatccagttcgatgtaacccactcgtgcacccaactgatcttcagcatcttttactttcaccagcgtttctgggtgagcaaaaacaggaaggcaaaatgccgcaaaaaagggaataagggcgacacggaaatgttgaatactcatactcttcctttttcaatattattgaagcatttatcagggttattgtctcatgagcggatacatatttgaatgtatttagaaaaataaacaaataggggttccgcgcacatttccccgaaaagtgccagatacctgaaacaaaacccatcgtacggccaaggaagtctccaataactgtgatccaccacaagcgccagggttttcccagtcacgacgttgtaaaacgacggccagtcatgcataatccgcacgcatctggaataaggaagtgccattccgcctgacctttgcctatgaggaccaaaacgaaaaaacaccctttcgggtgtcttttctggaatttggtaccgagaggctccatgattcagtatgacttgcctttggtcgaaaaaaaaagcccgcactgtcaggtgcgggcttttttctgtgtttccttattaggacccactttcacatttaagttgtttttctaatccgcatatgatcaattcaaggccgaataagaaggctggctctgcaccttggtgatcaaataattcgatagcttgtcgtaataatggcggcatactatcagtagtaggtgtttccctttcttctttagcgacttgatgctcttgatcttccaatacgcaacctaaagtaaaatgccccacagcgctgagtgcatataatgcattctctagtgaaaaaccttgttggcataaaaaggctaattgattttcgagagtttcatactgtttttctgtaggccgtgtacctaaatgtacttttgctccatcgcgatgacttagtaaagcacatctaaaacttttagcgttattacgtaaaaaatcttgccagctttccccttctaaagggcaaaagtgagtatggtgcctatctaacatctcaatggctaaggcgtcgagcaaagcccgcttattttttacatgccaatacaatgtaggctgctctacacctagcttctgggcgagtttacgggttgttaaaccttcgattccgacctcattaagcagctctaatgcgctgttaatcactttacttttatctaatctggacatattcaccaccctgaattgactctcttccgggcgctatcatgccataccgcgaaaggttttgcgccattcgatggcgcgccgccattgcttgtgcaatgtacatcagagattttgagacacaaccaattattgaaggcctccctaacggggggcctttttttgtttctggtcccccgcttaacgatcgttggctgttttcagcaggacgcactgacctccctatcagtgatagagattgacatccctatcagtgatagagatactgagcacagctgtcaccggatgtgctttccggtctgatgagtccgtgaggacgaaacagcctctacaaataattttgtttaaatcacacgggtaaggaggtatttaaatgaaaacactgtcccaagcacagtcgaagacgagtagccagcagttttctttcaccggtaattctagcgctaacgtgattatcggcaaccagaaactaactatcaacgacgtcgcccgcgttgctcggaacgggaccttagtaagcctgactaacaacactgatatacttcaaggcattcaggcgtcctgtgattatatcaataacgcagttgagtctggtgaaccaatttacggtgtgacctcaggcttcggcggtatggcgaacgttgctatcagccgtgaacaggcctccgaactgcaatcgaatatggtatggtttctgaaaactggtgctgggaacaaactccctttggcggacgtacgtgcagcaatgctgctgcgcgccaactcgcatatgcgtggcgcgtccggtatccgtctggagctgatcaaacgtatggaaatcttcttgaacgctggtgttactccgtacgtttatgaatttggatctatcggcgcttctggagatctggtcccgctgagctacattacgggttccctgattggccttgacccgagcttcaaggtggatttcaacggcaaagaaatggacgccccgaccgcgttacgccagttaaatctgtctcccctgacacttctgcctaaagaaggtattgctatgctcaatgggacctcagtcatgactggcatcgcagctaactgcgtatacgacacccagatcctgactgcgattgcaatgggtgttcacgctctggatatccaggccctgaacggcaccaaccagtctttccacccgtttatccataactctaagccgcacccaggtcagctgtgggcggctgatcagatgatatcattgctggctaactcgcaactggtacgggacgagctggacggcaaacatgattaccgcgaccacgagctgatccaggatcgttatagcctgcgttgccttccgcagtacctgggtccgattgtggacggtatctcacagatagcaaaacaaatcgaaattgaaattaactccgttactgataaccctctgattgacgtcgataaccaggcgtcgtaccacggcggaaatttcctgggtcagtatgttggcatgggtatggaccaccttcgctactatatcggcctgctggcgaaacacctggatgtgcagattgcgctgctagctagtcccgaatttagcaacggactgccgccatctttattgggcaaccgtgaacgtaaggttaacatgggtctgaaaggtttacaaatctgtggcaattccatcatgccgctgctgacgttctacggcaatagcatcgccgaccgctttccgacccatgcagagcaattcaaccagaatatcaactctcagggctacacctccgcaacgctggcgcgacgtagtgttgatatcttccaaaactacgttgcgattgccctgatgtttggcgtccaggctgtagacctgaggacttataaaaagactggccattacgatgcgcgtgcttgcctctctccggctaccgaacgcctgtattccgccgtgcgtcacgtagttggtcagaaacctacttcagatcgcccatacatctggaacgataacgagcagggtctggatgaacacatcgctcgcatctccgctgacattgccgctggcggagtaattgttcaagctgtacaggatatcctgccgtgcctgcactaaccggcttatcggtcagtttcacctgatttacgtaaaaacccgcttcggcgggtttttgcttttggaggggcagaaagatgaatgactgtccacgacgctatacccaaaagaaa

SEQ ID NO: 213 - DNA, 5122 bp, synthetic construct
  source 1..5122: mol_type = other DNA
aggctaggtggaggctcagtgatgataagtctgcgatggtggatgcatgtgtcatggtcatagctgtttcctgtgtgaaattgttatccgctcagagggcacaatcctattccgcgctatccgacaatctccaagacattaggtggagttcagttcggcgagcggaaatggcttacgaacggggcggagatttcctggaagatgccaggaagatacttaacagggaagtgagagggccgcggcaaagccgtttttccataggctccgcccccctgacaagcatcacgaaatctgacgctcaaatcagtggtggcgaaacccgacaggactataaagataccaggcgtttccccctggcggctccctcgtgcgctctcctgttcctgcctttcggtttaccggtgtcattccgctgttatggccgcgtttgtctcattccacgcctgacactcagttccgggtaggcagttcgctccaagctggactgtatgcacgaaccccccgttcagtccgaccgctgcgccttatccggtaactatcgtcttgagtccaacccggaaagacatgcaaaagcaccactggcagcagccactggtaattgatttagaggagttagtcttgaagtcatgcgccggttaaggctaaactgaaaggacaagttttggtgactgcgctcctccaagccagttacctcggttcaaagagttggtagctcagagaaccttcgaaaaaccgccctgcaaggcggttttttcgttttcagagcaagagattacgcgcagaccaaaacgatctcaagaagatcatcttattaagtctgacgctctattcaacaaagccgccgtccatgggtagggggcttcaaatcgtcctcgtgataccaattcggagcctgcttttttgtacaaacttgttgataatggcaattcaaggatcttcacctagatccttttaaattaaaaatgaagttttaaatcaatctaaagtatatatgagtaaacttggtctgacagttaccaatgcttaatcagtgaggcacctatctcagcgatctgtctatttcgttcatccatagttgcctgactccccgtcgtgtagataactacgatacgggagggcttaccatctggccccagtgctgcaatgataccgcgagagccacgctcaccggctccagatttatcagcaataaaccagccagccggaagggccgagcgcagaagtggtcctgcaactttatccgcctccatccagtctattaattgttgccgggaagctagagtaagtagttcgccagttaatagtttgcgcaacgttgttgccattgctacaggcatcgtggtgtcacgctcgtcgtttggtatggcttcattcagctccggttcccaacgatcaaggcgagttacatgatcccccatgttgtgcaaaaaagcggttagctccttcggtcctccgatcgttgtcagaagtaagttggccgcagtgttatcactcatggttatggcagcactgcataattctcttactgtcatgccatccgtaagatgcttttctgtgactggtgagtactcaaccaagtcattctgagaatagtgtatgcggcgaccgagttgctcttgcccggcgtcaatacgggataataccgcgccacatagcagaactttaaaagtgctcatcattggaaaacgttcttcggggcgaaaactctcaaggatcttaccgctgttgagatccagttcgatgtaacccactcgtgcacccaactgatcttcagcatcttttactttcaccagcgtttctgggtgagcaaaaacaggaaggcaaaatgccgcaaaaaagggaataagggcgacacggaaatgttgaatactcatactcttcctttttcaatattattgaagcatttatcagggttattgtctcatgagcggatacatatttgaatgtatttagaaaaataaacaaataggggttccgcgcacatttccccgaaaagtgccagatacctgaaacaaaacccatcgtacggccaaggaagtctccaataactgtgatccaccacaagcgccagggttttcccagtcacgacgttgtaaaacgacggccagtcatgcataatccgcacgcatctggaataaggaagtgccattccgcctgacctttgcctatgaggaccaaaacgaaaaaacaccctttcgggtgtcttttctggaatttggtaccgagaggctccatgattcagtatgacttgcctttggtcgaaaaaaaaagcccgcactgtcaggtgcgggcttttttctgtgtttccttattaggacccactttcacatttaagttgtttttctaatccgcatatgatcaattcaaggccgaataagaaggctggctctgcaccttggtgatcaaataattcgatagcttgtcgtaataatggcggcatactatcagtagtaggtgtttccctttcttctttagcgacttgatgctcttgatcttccaatacgcaacctaaagtaaaatgccccacagcgctgagtgcatataatgcattctctagtgaaaaaccttgttggcataaaaaggctaattgattttcgagagtttcatactgtttttctgtaggccgtgtacctaaatgtacttttgctccatcgcgatgacttagtaaagcacatctaaaacttttagcgttattacgtaaaaaatcttgccagctttccccttctaaagggcaaaagtgagtatggtgcctatctaacatctcaatggctaaggcgtcgagcaaagcccgcttattttttacatgccaatacaatgtaggctgctctacacctagcttctgggcgagtttacgggttgttaaaccttcgattccgacctcattaagcagctctaatgcgctgttaatcactttacttttatctaatctggacatattcaccaccctgaattgactctcttccgggcgctatcatgccataccgcgaaaggttttgcgccattcgatggcgcgccgccattgcttgtgcaatgtacatcagagattttgagacacaaccaattattgaaggcctccctaacggggggcctttttttgtttctggtcccccgcttaacgatcgttggctgttttcagcaggacgcactgacctccctatcagtgatagagattgacatccctatcagtgatagagatactgagcacagctgtcaccggatgtgctttccggtctgatgagtccgtgaggacgaaacagcctctacaaataattttgtttaaatcacacgggtaaggaggtatttaaatgaaaacactgtcccaagcacagtcgaagacgagtagccagcagttttctttcaccggtaattctagcgctaacgtgattatcggcaaccagaaactaactatcaacgacgtcgcccgcgttgctcggaacgggaccttagtaagcctgactaacaacactgatatacttcaaggcattcaggcgtcctgtgattatatcaataacgcagttgagtctggtgaaccaatttacggtgtgacctcaggcttcggcggtatggcgaacgttgctatcagccgtgaacaggcctccgaactgcaacacaatttggtatggtttaccaaaactggtgctgggaacaaactccctttggcggacgtacgtgcagcaatgctgctgcgcgccaactcgcatatgcgtggcgcgtccggtatccgtctggagctgatcaaacgtatggaaatcttcttgaacgctggtgttactccgtacgtttatgaatttggatctatcggcgcttctggagatctggtcccgctgagctacattacgggttccctgattggccttgacccgagcttcaaggtggatttcaacggcaaagaaatggacgccccgaccgcgttacgccagttaaatctgtctcccctgacacttctgcctaaagaaggtctagctatgatgaatgggacctcagtcatgactggcatcgcagctaactgcgtatacgacacccagatcctgactgcgattgcaatgggtgttcacgctctggatatccaggccctgaacggcaccaaccagtctttccacccgtttatccataactctaagccgcacccaggtcagctgtgggcggctgatcagatgatatcattgctggctaactcgcaactggtacgggacgagctggacggcaaacatgattaccgcgaccacgagctgatccaggatcgttatagcctgcgttgccttccgcagtacctgggtccgattgtggacggtatctcacagatagcaaaacaaatcgaaattgaaattaactccgttactgataaccctctgattgacgtcgataaccaggcgtcgtaccacggcggaaatttcctgggtcagtatgttggcatgggtatggaccaccttcgctactatatcggcctgctggcgaaacacctggatgtgcagattgcgctgctagctagtcccgaatttagcaacggactgccgccatctttattgggcaaccgtgaacgtaaggttaacatgggtctgaaaggtttacaaatctgtggcaattccatcatgccgctgctgacgttctacggcaatagcatcgccgaccgctttccgacccatgcagagcaattcaaccagaatatcaactctcagggctacacctccgcaacgctggcgcgacgtagtgttgatatcttccaaaactacgttgcgattgccctgatgtttggcgtccaggctgtagacctgaggacttataaaaagactggccattacgatgcgcgtgcttgcctctctccggctaccgaacgcctgtattccgccgtgcgtcacgtagttggtcagaaacctacttcagatcgcccatacatctggaacgataacgagcagggtctggatgaacacatcgctcgcatctccgctgacattgccgctggcggagtaattgttcaagctgtacaggatatcctgccgtgcctgcactaaccggcttatcggtcagtttcacctgatttacgtaaaaacccgcttcggcgggtttttgcttttggaggggcagaaagatgaatgactgtccacgacgctatacccaaaagaaa

SEQ ID NO: 214 - DNA, 5122 bp, synthetic construct
  source 1..5122: mol_type = other DNA
aggctaggtggaggctcagtgatgataagtctgcgatggtggatgcatgtgtcatggtcatagctgtttcctgtgtgaaattgttatccgctcagagggcacaatcctattccgcgctatccgacaatctccaagacattaggtggagttcagttcggcgagcggaaatggcttacgaacggggcggagatttcctggaagatgccaggaagatacttaacagggaagtgagagggccgcggcaaagccgtttttccataggctccgcccccctgacaagcatcacgaaatctgacgctcaaatcagtggtggcgaaacccgacaggactataaagataccaggcgtttccccctggcggctccctcgtgcgctctcctgttcctgcctttcggtttaccggtgtcattccgctgttatggccgcgtttgtctcattccacgcctgacactcagttccgggtaggcagttcgctccaagctggactgtatgcacgaaccccccgttcagtccgaccgctgcgccttatccggtaactatcgtcttgagtccaacccggaaagacatgcaaaagcaccactggcagcagccactggtaattgatttagaggagttagtcttgaagtcatgcgccggttaaggctaaactgaaaggacaagttttggtgactgcgctcctccaagccagttacctcggttcaaagagttggtagctcagagaaccttcgaaaaaccgccctgcaaggcggttttttcgttttcagagcaagagattacgcgcagaccaaaacgatctcaagaagatcatcttattaagtctgacgctctattcaacaaagccgccgtccatgggtagggggcttcaaatcgtcctcgtgataccaattcggagcctgcttttttgtacaaacttgttgataatggcaattcaaggatcttcacctagatccttttaaattaaaaatgaagttttaaatcaatctaaagtatatatgagtaaacttggtctgacagttaccaatgcttaatcagtgaggcacctatctcagcgatctgtctatttcgttcatccatagttgcctgactccccgtcgtgtagataactacgatacgggagggcttaccatctggccccagtgctgcaatgataccgcgagagccacgctcaccggctccagatttatcagcaataaaccagccagccggaagggccgagcgcagaagtggtcctgcaactttatccgcctccatccagtctattaattgttgccgggaagctagagtaagtagttcgccagttaatagtttgcgcaacgttgttgccattgctacaggcatcgtggtgtcacgctcgtcgtttggtatggcttcattcagctccggttcccaacgatcaaggcgagttacatgatcccccatgttgtgcaaaaaagcggttagctccttcggtcctccgatcgttgtcagaagtaagttggccgcagtgttatcactcatggttatggcagcactgcataattctcttactgtcatgccatccgtaagatgcttttctgtgactggtgagtactcaaccaagtcattctgagaatagtgtatgcggcgaccgagttgctcttgcccggcgtcaatacgggataataccgcgccacatagcagaactttaaaagtgctcatcattggaaaacgttcttcggggcgaaaactctcaaggatcttaccgctgttgagatccagttcgatgtaacccactcgtgcacccaactgatcttcagcatcttttactttcaccagcgtttctgggtgagcaaaaacaggaaggcaaaatgccgcaaaaaagggaataagggcgacacggaaatgttgaatactcatactcttcctttttcaatattattgaagcatttatcagggttattgtctcatgagcggatacatatttgaatgtatttagaaaaataaacaaataggggttccgcgcacatttccccgaaaagtgccagatacctgaaacaaaacccatcgtacggccaaggaagtctccaataactgtgatccaccacaagcgccagggttttcccagtcacgacgttgtaaaacgacggccagtcatgcataatccgcacgcatctggaataaggaagtgccattccgcctgacctttgcctatgaggaccaaaacgaaaaaacaccctttcgggtgtcttttctggaatttggtaccgagaggctccatgattcagtatgacttgcctttggtcgaaaaaaaaagcccgcactgtcaggtgcgggcttttttctgtgtttccttattaggacccactttcacatttaagttgtttttctaatccgcatatgatcaattcaaggccgaataagaaggctggctctgcaccttggtgatcaaataattcgatagcttgtcgtaataatggcggcatactatcagtagtaggtgtttccctttcttctttagcgacttgatgctcttgatcttccaatacgcaacctaaagtaaaatgccccacagcgctgagtgcatataatgcattctctagtgaaaaaccttgttggcataaaaaggctaattgattttcgagagtttcatactgtttttctgtaggccgtgtacctaaatgtacttttgctccatcgcgatgacttagtaaagcacatctaaaacttttagcgttattacgtaaaaaatcttgccagctttccccttctaaagggcaaaagtgagtatggtgcctatctaacatctcaatggctaaggcgtcgagcaaagcccgcttattttttacatgccaatacaatgtaggctgctctacacctagcttctgggcgagtttacgggttgttaaaccttcgattccgacctcattaagcagctctaatgcgctgttaatcactttacttttatctaatctggacatattcaccaccctgaattgactctcttccgggcgctatcatgccataccgcgaaaggttttgcgccattcgatggcgcgccgccattgcttgtgcaatgtacatcagagattttgagacacaaccaattattgaaggcctccctaacggggggcctttttttgtttctggtcccccgcttaacgatcgttggctgttttcagcaggacgcactgacctccctatcagtgatagagattgacatccctatcagtgatagagatactgagcacagctgtcaccggatgtgctttccggtctgatgagtccgtgaggacgaaacagcctctacaaataattttgtttaaatcacacgggtaaggaggtatttaaatgaaaacactgtcccaagcacagtcgaagacgagtagccagcagttttctttcaccggtaattctagcgctaacgtgattatcggcaaccagaaactaactatcaacgacgtcgcccgcgttgctcggaacgggaccttagtaagcctgactaacaacactgatatacttcaaggcattcaggcgtcctgtgattatatcaataacgcagttgagtctggtgaaccaatttacggtgtgacctcaggcttcggcggtatggcgaacgttgctatcagccgtgaacaggcctccgaactgcaaaccaatatggtatggtttctgaaaactggtgctgggaacaaactccctttggcggacgtacgtgcagcaatgctgctgcgcgccaactcgcatatgcgtggcgcgtccggtatccgtctggagctgatcaaacgtatggaaatcttcttgaacgctggtgttactccgtacgtttatgaatttggatctatcggcgcttctggagatctggtcccgctgagctacattacgggttccctgattggccttgacccgagcttcaaggtggatttcaacggcaaagaaatggacgccccgaccgcgttacgccagttaaatctgtctcccctgacacttctgcctaaagaaggtctagctatggtgaatgggacctcagtcatgactggcatcgcagctaactgcgtatacgacacccagatcctgactgcgattgcaatgggtgttcacgctctggatatccaggccctgaacggcaccaaccagtctttccacccgtttatccataactctaagccgcacccaggtcagctgtgggcggctgatcagatgatatcattgctggctaactcgcaactggtacgggacgagctggacggcaaacatgattaccgcgaccacgagctgatccaggatcgttatagcctgcgttgccttccgcagtacctgggtccgattgtggacggtatctcacagatagcaaaacaaatcgaaattgaaattaactccgttactgataaccctctgattgacgtcgataaccaggcgtcgtaccacggcggaaatttcctgggtcagtatgttggcatgggtatggaccaccttcgctactatatcggcctgctggcgaaacacctggatgtgcagattgcgctgctagctagtcccgaatttagcaacggactgccgccatctttattgggcaaccgtgaacgtaaggttaacatgggtctgaaaggtttacaaatctgtggcaattccatcatgccgctgctgacgttctacggcaatagcatcgccgaccgctttccgacccatgcagagcaattcaaccagaatatcaactctcagggctacacctccgcaacgctggcgcgacgtagtgttgatatcttccaaaactacgttgcgattgccctgatgtttggcgtccaggctgtagacctgaggacttataaaaagactggccattacgatgcgcgtgcttgcctctctccggctaccgaacgcctgtattccgccgtgcgtcacgtagttggtcagaaacctacttcagatcgcccatacatctggaacgataacgagcagggtctggatgaacacatcgctcgcatctccgctgacattgccgctggcggagtaattgttcaagctgtacaggatatcctgccgtgcctgcactaaccggcttatcggtcagtttcacctgatttacgtaaaaacccgcttcggcgggtttttgcttttggaggggcagaaagatgaatgactgtccacgacgctatacccaaaagaaa

SEQ ID NO: 215 - DNA, 5122 bp, synthetic construct
  source 1..5122: mol_type = other DNA
aggctaggtggaggctcagtgatgataagtctgcgatggtggatgcatgtgtcatggtcatagctgtttcctgtgtgaaattgttatccgctcagagggcacaatcctattccgcgctatccgacaatctccaagacattaggtggagttcagttcggcgagcggaaatggcttacgaacggggcggagatttcctggaagatgccaggaagatacttaacagggaagtgagagggccgcggcaaagccgtttttccataggctccgcccccctgacaagcatcacgaaatctgacgctcaaatcagtggtggcgaaacccgacaggactataaagataccaggcgtttccccctggcggctccctcgtgcgctctcctgttcctgcctttcggtttaccggtgtcattccgctgttatggccgcgtttgtctcattccacgcctgacactcagttccgggtaggcagttcgctccaagctggactgtatgcacgaaccccccgttcagtccgaccgctgcgccttatccggtaactatcgtcttgagtccaacccggaaagacatgcaaaagcaccactggcagcagccactggtaattgatttagaggagttagtcttgaagtcatgcgccggttaaggctaaactgaaaggacaagttttggtgactgcgctcctccaagccagttacctcggttcaaagagttggtagctcagagaaccttcgaaaaaccgccctgcaaggcggttttttcgttttcagagcaagagattacgcgcagaccaaaacgatctcaagaagatcatcttattaagtctgacgctctattcaacaaagccgccgtccatgggtagggggcttcaaatcgtcctcgtgataccaattcggagcctgcttttttgtacaaacttgttgataatggcaattcaaggatcttcacctagatccttttaaattaaaaatgaagttttaaatcaatctaaagtatatatgagtaaacttggtctgacagttaccaatgcttaatcagtgaggcacctatctcagcgatctgtctatttcgttcatccatagttgcctgactccccgtcgtgtagataactacgatacgggagggcttaccatctggccccagtgctgcaatgataccgcgagagccacgctcaccggctccagatttatcagcaataaaccagccagccggaagggccgagcgcagaagtggtcctgcaactttatccgcctccatccagtctattaattgttgccgggaagctagagtaagtagttcgccagttaatagtttgcgcaacgttgttgccattgctacaggcatcgtggtgtcacgctcgtcgtttggtatggcttcattcagctccggttcccaacgatcaaggcgagttacatgatcccccatgttgtgcaaaaaagcggttagctccttcggtcctccgatcgttgtcagaagtaagttggccgcagtgttatcactcatggttatggcagcactgcataattctcttactgtcatgccatccgtaagatgcttttctgtgactggtgagtactcaaccaagtcattctgagaatagtgtatgcggcgaccgagttgctcttgcccggcgtcaatacgggataataccgcgccacatagcagaactttaaaagtgctcatcattggaaaacgttcttcggggcgaaaactctcaaggatcttaccgctgttgagatccagttcgatgtaacccactcgtgcacccaactgatcttcagcatcttttactttcaccagcgtttctgggtgagcaaaaacaggaaggcaaaatgccgcaaaaaagggaataagggcgacacggaaatgttgaatactcatactcttcctttttcaatattattgaagcatttatcagggttattgtctcatgagcggatacatatttgaatgtatttagaaaaataaacaaataggggttccgcgcacatttccccgaaaagtgccagatacctgaaacaaaacccatcgtacggccaaggaagtctccaataactgtgatccaccacaagcgccagggttttcccagtcacgacgttgtaaaacgacggccagtcatgcataatccgcacgcatctggaataaggaagtgccattccgcctgacctttgcctatgaggaccaaaacgaaaaaacaccctttcgggtgtcttttctggaatttggtaccgagaggctccatgattcagtatgacttgcctttggtcgaaaaaaaaagcccgcactgtcaggtgcgggcttttttctgtgtttccttattaggacccactttcacatttaagttgtttttctaatccgcatatgatcaattcaaggccgaataagaaggctggctctgcaccttggtgatcaaataattcgatagcttgtcgtaataatggcggcatactatcagtagtaggtgtttccctttcttctttagcgacttgatgctcttgatcttccaatacgcaacctaaagtaaaatgccccacagcgctgagtgcatataatgcattctctagtgaaaaaccttgttggcataaaaaggctaattgattttcgagagtttcatactgtttttctgtaggccgtgtacctaaatgtacttttgctccatcgcgatgacttagtaaagcacatctaaaacttttagcgttattacgtaaaaaatcttgccagctttccccttctaaagggcaaaagtgagtatggtgcctatctaacatctcaatggctaaggcgtcgagcaaagcccgcttattttttacatgccaatacaatgtaggctgctctacacctagcttctgggcgagtttacgggttgttaaaccttcgattccgacctcattaagcagctctaatgcgctgttaatcactttacttttatctaatctggacatattcaccaccctgaattgactctcttccgggcgctatcatgccataccgcgaaaggttttgcgccattcgatggcgcgccgccattgcttgtgcaatgtacatcagagattttgagacacaaccaattattgaaggcctccctaacggggggcctttttttgtttctggtcccccgcttaacgatcgttggctgttttcagcaggacgcactgacctccctatcagtgatagagattgacatccctatcagtgatagagatactgagcacagctgtcaccggatgtgctttccggtctgatgagtccgtgaggacgaaacagcctctacaaataattttgtttaaatcacacgggtaaggaggtatttaaatgaaaacactgtcccaagcacagtcgaagacgagtagccagcagttttctttcaccggtaattctagcgctaacgtgattatcggcaaccagaaactaactatcaacgacgtcgcccgcgttgctcggaacgggaccttagtaagcctgactaacaacactgatatacttcaaggcattcaggcgtcctgtgattatatcaataacgcagttgagtctggtgaaccaatttacggtgtgacctcaggcttcggcggtatggcgaacgttgctatcagccgtgaacaggcctccgaactgcaacataatatggtatggtttctgaaaactggtgctgggaacaaactccctttggcggacgtacgtgcagcaatgctgctgcgcgccaactcgcatatgcgtggcgcgtccggtatccgtctggagctgatcaaacgtatggaaatcttcttgaacgctggtgttactccgtacgtttatgaatttggatctatcggcgcttctggagatctggtcccgctgagctacattacgggttccctgattggccttgacccgagcttcaaggtggatttcaacggcaaagaaatggacgccccgaccgcgttacgccagttaaatctgtctcccctgacacttctgcctaaagaagcgctagctatgaccaatgggacctcagtcatgactggcatcgcagctaactgcgtatacgacacccagatcctgactgcgattgcaatgggtgttcacgctctggatatccaggccctgaacggcaccaaccagtctttccacccgtttatccataactctaagccgcacccaggtcagctgtgggcggctgatcagatgatatcattgctggctaactcgcaactggtacgggacgagctggacggcaaacatgattaccgcgaccacgagctgatccaggatcgttatagcctgcgttgccttccgcagtacctgggtccgattgtggacggtatctcacagatagcaaaacaaatcgaaattgaaattaactccgttactgataaccctctgattgacgtcgataaccaggcgtcgtaccacggcggaaatttcctgggtcagtatgttggcatgggtatggaccaccttcgctactatatcggcctgctggcgaaacacctggatgtgcagattgcgctgctagctagtcccgaatttagcaacggactgccgccatctttattgggcaaccgtgaacgtaaggttaacatgggtctgaaaggtttacaaatctgtggcaattccatcatgccgctgctgacgttctacggcaatagcatcgccgaccgctttccgacccatgcagagcaattcaaccagaatatcaactctcagggctacacctccgcaacgctggcgcgacgtagtgttgatatcttccaaaactacgttgcgattgccctgatgtttggcgtccaggctgtagacctgaggacttataaaaagactggccattacgatgcgcgtgcttgcctctctccggctaccgaacgcctgtattccgccgtgcgtcacgtagttggtcagaaacctacttcagatcgcccatacatctggaacgataacgagcagggtctggatgaacacatcgctcgcatctccgctgacattgccgctggcggagtaattgttcaagctgtacaggatatcctgccgtgcctgcactaaccggcttatcggtcagtttcacctgatttacgtaaaaacccgcttcggcgggtttttgcttttggaggggcagaaagatgaatgactgtccacgacgctatacccaaaagaaa

SEQ ID NO: 216 - DNA, 5122 bp, synthetic construct
  source 1..5122: mol_type = other DNA
aggctaggtggaggctcagtgatgataagtctgcgatggtggatgcatgtgtcatggtcatagctgtttcctgtgtgaaattgttatccgctcagagggcacaatcctattccgcgctatccgacaatctccaagacattaggtggagttcagttcggcgagcggaaatggcttacgaacggggcggagatttcctggaagatgccaggaagatacttaacagggaagtgagagggccgcggcaaagccgtttttccataggctccgcccccctgacaagcatcacgaaatctgacgctcaaatcagtggtggcgaaacccgacaggactataaagataccaggcgtttccccctggcggctccctcgtgcgctctcctgttcctgcctttcggtttaccggtgtcattccgctgttatggccgcgtttgtctcattccacgcctgacactcagttccgggtaggcagttcgctccaagctggactgtatgcacgaaccccccgttcagtccgaccgctgcgccttatccggtaactatcgtcttgagtccaacccggaaagacatgcaaaagcaccactggcagcagccactggtaattgatttagaggagttagtcttgaagtcatgcgccggttaaggctaaactgaaaggacaagttttggtgactgcgctcctccaagccagttacctcggttcaaagagttggtagctcagagaaccttcgaaaaaccgccctgcaaggcggttttttcgttttcagagcaagagattacgcgcagaccaaaacgatctcaagaagatcatcttattaagtctgacgctctattcaacaaagccgccgtccatgggtagggggcttcaaatcgtcctcgtgataccaattcggagcctgcttttttgtacaaacttgttgataatggcaattcaaggatcttcacctagatccttttaaattaaaaatgaagttttaaatcaatctaaagtatatatgagtaaacttggtctgacagttaccaatgcttaatcagtgaggcacctatctcagcgatctgtctatttcgttcatccatagttgcctgactccccgtcgtgtagataactacgatacgggagggcttaccatctggccccagtgctgcaatgataccgcgagagccacgctcaccggctccagatttatcagcaataaaccagccagccggaagggccgagcgcagaagtggtcctgcaactttatccgcctccatccagtctattaattgttgccgggaagctagagtaagtagttcgccagttaatagtttgcgcaacgttgttgccattgctacaggcatcgtggtgtcacgctcgtcgtttggtatggcttcattcagctccggttcccaacgatcaaggcgagttacatgatcccccatgttgtgcaaaaaagcggttagctccttcggtcctccgatcgttgtcagaagtaagttggccgcagtgttatcactcatggttatggcagcactgcataattctcttactgtcatgccatccgtaagatgcttttctgtgactggtgagtactcaaccaagtcattctgagaatagtgtatgcggcgaccgagttgctcttgcccggcgtcaatacgggataataccgcgccacatagcagaactttaaaagtgctcatcattggaaaacgttcttcggggcgaaaactctcaaggatcttaccgctgttgagatccagttcgatgtaacccactcgtgcacccaactgatcttcagcatcttttactttcaccagcgtttctgggtgagcaaaaacaggaaggcaaaatgccgcaaaaaagggaataagggcgacacggaaatgttgaatactcatactcttcctttttcaatattattgaagcatttatcagggttattgtctcatgagcggatacatatttgaatgtatttagaaaaataaacaaataggggttccgcgcacatttccccgaaaagtgccagatacctgaaacaaaacccatcgtacggccaaggaagtctccaataactgtgatccaccacaagcgccagggttttcccagtcacgacgttgtaaaacgacggccagtcatgcataatccgcacgcatctggaataaggaagtgccattccgcctgacctttgcctatgaggaccaaaacgaaaaaacaccctttcgggtgtcttttctggaatttggtaccgagaggctccatgattcagtatgacttgcctttggtcgaaaaaaaaagcccgcactgtcaggtgcgggcttttttctgtgtttccttattaggacccactttcacatttaagttgtttttctaatccgcatatgatcaattcaaggccgaataagaaggctggctctgcaccttggtgatcaaataattcgatagcttgtcgtaataatggcggcatactatcagtagtaggtgtttccctttcttctttagcgacttgatgctcttgatcttccaatacgcaacctaaagtaaaatgccccacagcgctgagtgcatataatgcattctctagtgaaaaaccttgttggcataaaaaggctaattgattttcgagagtttcatactgtttttctgtaggccgtgtacctaaatgtacttttgctccatcgcgatgacttagtaaagcacatctaaaacttttagcgttattacgtaaaaaatcttgccagctttccccttctaaagggcaaaagtgagtatggtgcctatctaacatctcaatggctaaggcgtcgagcaaagcccgcttattttttacatgccaatacaatgtaggctgctctacacctagcttctgggcgagtttacgggttgttaaaccttcgattccgacctcattaagcagctctaatgcgctgttaatcactttacttttatctaatctggacatattcaccaccctgaattgactctcttccgggcgctatcatgccataccgcgaaaggttttgcgccattcgatggcgcgccgccattgcttgtgcaatgtacatcagagattttgagacacaaccaattattgaaggcctccctaacggggggcctttttttgtttctggtcccccgcttaacgatcgttggctgttttcagcaggacgcactgacctccctatcagtgatagagattgacatccctatcagtgatagagatactgagcacagctgtcaccggatgtgctttccggtctgatgagtccgtgaggacgaaacagcctctacaaataattttgtttaaatcacacgggtaaggaggtatttaaatgaaaacactgtcccaagcacagtcgaagacgagtagccagcagttttctttcaccggtaattctagcgctaacgtgattatcggcaaccagaaactaactatcaacgacgtcgcccgcgttgctcggaacgggaccttagtaagcctgactaacaacactgatatacttcaaggcattcaggcgtcctgtgattatatcaataacgcagttgagtctggtgaaccaatttacggtgtgacctcaggcttcggcggtatggcgaacgttgctatcagccgtgaacaggcctccgaactgcaaaccaatttggtatggtttctgaaaactggtgctgggaacaaactccctttggcggacgtacgtgcagcaatgctgctgcgcgccaactcgcatatgcgtggcgcgtccggtatccgtctggagctgatcaaacgtatggaaatcttcttgaacgctggtgttactccgtacgtttatgaatttggatctatcggcgcttctggagatctggtcccgctgagctacattacgggttccctgattggccttgacccgagcttcaaggtggatttcaacggcaaagaaatggacgccccgaccgcgttacgccagttaaatctgtctcccctgacacttctgcctaaagaaggtctagctatgctgaatgggacctcagtcatgactggcatcgcagctaactgcgtatacgacacccagatcctgactgcgattgcaatgggtgttcacgctctggatatccaggccctgaacggcaccaaccagtctttccacccgtttatccataactctaagccgcacccaggtcagctgtgggcggctgatcagatgatatcattgctggctaactcgcaactggtacgggacgagctggacggcaaacatgattaccgcgaccacgagctgatccaggatcgttatagcctgcgttgccttccgcagtacctgggtccgattgtggacggtatctcacagatagcaaaacaaatcgaaattgaaattaactccgttactgataaccctctgattgacgtcgataaccaggcgtcgtaccacggcggaaatttcctgggtcagtatgttggcatgggtatggaccaccttcgctactatatcggcctgctggcgaaacacctggatgtgcagattgcgctgctagctagtcccgaatttagcaacggactgccgccatctttattgggcaaccgtgaacgtaaggttaacatgggtctgaaaggtttacaaatctgtggcaattccatcatgccgctgctgacgttctacggcaatagcatcgccgaccgctttccgacccatgcagagcaattcaaccagaatatcaactctcagggctacacctccgcaacgctggcgcgacgtagtgttgatatcttccaaaactacgttgcgattgccctgatgtttggcgtccaggctgtagacctgaggacttataaaaagactggccattacgatgcgcgtgcttgcctctctccggctaccgaacgcctgtattccgccgtgcgtcacgtagttggtcagaaacctacttcagatcgcccatacatctggaacgataacgagcagggtctggatgaacacatcgctcgcatctccgctgacattgccgctggcggagtaattgttcaagctgtacaggatatcctgccgtgcctgcactaaccggcttatcggtcagtttcacctgatttacgtaaaaacccgcttcggcgggtttttgcttttggaggggcagaaagatgaatgactgtccacgacgctatacccaaaagaaa

SEQ ID NO: 217 - DNA, 5122 bp, synthetic construct
  source 1..5122: mol_type = other DNA
aggctaggtggaggctcagtgatgataagtctgcgatggtggatgcatgtgtcatggtcatagctgtttcctgtgtgaaattgttatccgctcagagggcacaatcctattccgcgctatccgacaatctccaagacattaggtggagttcagttcggcgagcggaaatggcttacgaacggggcggagatttcctggaagatgccaggaagatacttaacagggaagtgagagggccgcggcaaagccgtttttccataggctccgcccccctgacaagcatcacgaaatctgacgctcaaatcagtggtggcgaaacccgacaggactataaagataccaggcgtttccccctggcggctccctcgtgcgctctcctgttcctgcctttcggtttaccggtgtcattccgctgttatggccgcgtttgtctcattccacgcctgacactcagttccgggtaggcagttcgctccaagctggactgtatgcacgaaccccccgttcagtccgaccgctgcgccttatccggtaactatcgtcttgagtccaacccggaaagacatgcaaaagcaccactggcagcagccactggtaattgatttagaggagttagtcttgaagtcatgcgccggttaaggctaaactgaaaggacaagttttggtgactgcgctcctccaagccagttacctcggttcaaagagttggtagctcagagaaccttcgaaaaaccgccctgcaaggcggttttttcgttttcagagcaagagattacgcgcagaccaaaacgatctcaagaagatcatcttattaagtctgacgctctattcaacaaagccgccgtccatgggtagggggcttcaaatcgtcctcgtgataccaattcggagcctgcttttttgtacaaacttgttgataatggcaattcaaggatcttcacctagatccttttaaattaaaaatgaagttttaaatcaatctaaagtatatatgagtaaacttggtctgacagttaccaatgcttaatcagtgaggcacctatctcagcgatctgtctatttcgttcatccatagttgcctgactccccgtcgtgtagataactacgatacgggagggcttaccatctggccccagtgctgcaatgataccgcgagagccacgctcaccggctccagatttatcagcaataaaccagccagccggaagggccgagcgcagaagtggtcctgcaactttatccgcctccatccagtctattaattgttgccgggaagctagagtaagtagttcgccagttaatagtttgcgcaacgttgttgccattgctacaggcatcgtggtgtcacgctcgtcgtttggtatggcttcattcagctccggttcccaacgatcaaggcgagttacatgatcccccatgttgtgcaaaaaagcggttagctccttcggtcctccgatcgttgtcagaagtaagttggccgcagtgttatcactcatggttatggcagcactgcataattctcttactgtcatgccatccgtaagatgcttttctgtgactggtgagtactcaaccaagtcattctgagaatagtgtatgcggcgaccgagttgctcttgcccggcgtcaatacgggataataccgcgccacatagcagaactttaaaagtgctcatcattggaaaacgttcttcggggcgaaaactctcaaggatcttaccgctgttgagatccagttcgatgtaacccactcgtgcacccaactgatcttcagcatcttttactttcaccagcgtttctgggtgagcaaaaacaggaaggcaaaatgccgcaaaaaagggaataagggcgacacggaaatgttgaatactcatactcttcctttttcaatattattgaagcatttatcagggttattgtctcatgagcggatacatatttgaatgtatttagaaaaataaacaaataggggttccgcgcacatttccccgaaaagtgccagatacctgaaacaaaacccatcgtacggccaaggaagtctccaataactgtgatccaccacaagcgccagggttttcccagtcacgacgttgtaaaacgacggccagtcatgcataatccgcacgcatctggaataaggaagtgccattccgcctgacctttgcctatgaggaccaaaacgaaaaaacaccctttcgggtgtcttttctggaatttggtaccgagaggctccatgattcagtatgacttgcctttggtcgaaaaaaaaagcccgcactgtcaggtgcgggcttttttctgtgtttccttattaggacccactttcacatttaagttgtttttctaatccgcatatgatcaattcaaggccgaataagaaggctggctctgcaccttggtgatcaaataattcgatagcttgtcgtaataatggcggcatactatcagtagtaggtgtttccctttcttctttagcgacttgatgctcttgatcttccaatacgcaacctaaagtaaaatgccccacagcgctgagtgcatataatgcattctctagtgaaaaaccttgttggcataaaaaggctaattgattttcgagagtttcatactgtttttctgtaggccgtgtacctaaatgtacttttgctccatcgcgatgacttagtaaagcacatctaaaacttttagcgttattacgtaaaaaatcttgccagctttccccttctaaagggcaaaagtgagtatggtgcctatctaacatctcaatggctaaggcgtcgagcaaagcccgcttattttttacatgccaatacaatgtaggctgctctacacctagcttctgggcgagtttacgggttgttaaaccttcgattccgacctcattaagcagctctaatgcgctgttaatcactttacttttatctaatctggacatattcaccaccctgaattgactctcttccgggcgctatcatgccataccgcgaaaggttttgcgccattcgatggcgcgccgccattgcttgtgcaatgtacatcagagattttgagacacaaccaattattgaaggcctccctaacggggggcctttttttgtttctggtcccccgcttaacgatcgttggctgttttcagcaggacgcactgacctccctatcagtgatagagattgacatccctatcagtgatagagatactgagcacagctgtcaccggatgtgctttccggtctgatgagtccgtgaggacgaaacagcctctacaaataattttgtttaaatcacacgggtaaggaggtatttaaatgaaaacactgtcccaagcacagtcgaagacgagtagccagcagttttctttcaccggtaattctagcgctaacgtgattatcggcaaccagaaactaactatcaacgacgtcgcccgcgttgctcggaacgggaccttagtaagcctgactaacaacactgatatacttcaaggcattcaggcgtcctgtgattatatcaataacgcagttgagtctggtgaaccaatttacggtgtgacctcaggcttcggcggtatggcgaacgttgctatcagccgtgaacaggcctccgaactgcaatcaaatttggtatggtttacgaaaactggtgctgggaacaaactccctttggcggacgtacgtgcagcaatgctgctgcgcgccaactcgcatatgcgtggcgcgtccggtatccgtctggagctgatcaaacgtatggaaatcttcttgaacgctggtgttactccgtacgtttatgaatttggatctatcggcgcttctggagatctggtcccgctgagctacattacgggttccctgattggccttgacccgagcttcaaggtggatttcaacggcaaagaaatggacgccccgaccgcgttacgccagttaaatctgtctcccctgacacttctgcctaaagaaggtctagctatgttgaatgggacctcagtcatgactggcatcgcagctaactgcgtatacgacacccagatcctgactgcgattgcaatgggtgttcacgctctggatatccaggccctgaacggcaccaaccagtctttccacccgtttatccataactctaagccgcacccaggtcagctgtgggcggctgatcagatgatatcattgctggctaactcgcaactggtacgggacgagctggacggcaaacatgattaccgcgaccacgagctgatccaggatcgttatagcctgcgttgccttccgcagtacctgggtccgattgtggacggtatctcacagatagcaaaacaaatcgaaattgaaattaactccgttactgataaccctctgattgacgtcgataaccaggcgtcgtaccacggcggaaatttcctgggtcagtatgttggcatgggtatggaccaccttcgctactatatcggcctgctggcgaaacacctggatgtgcagattgcgctgctagctagtcccgaatttagcaacggactgccgccatctttattgggcaaccgtgaacgtaaggttaacatgggtctgaaaggtttacaaatctgtggcaattccatcatgccgctgctgacgttctacggcaatagcatcgccgaccgctttccgacccatgcagagcaattcaaccagaatatcaactctcagggctacacctccgcaacgctggcgcgacgtagtgttgatatcttccaaaactacgttgcgattgccctgatgtttggcgtccaggctgtagacctgaggacttataaaaagactggccattacgatgcgcgtgcttgcctctctccggctaccgaacgcctgtattccgccgtgcgtcacgtagttggtcagaaacctacttcagatcgcccatacatctggaacgataacgagcagggtctggatgaacacatcgctcgcatctccgctgacattgccgctggcggagtaattgttcaagctgtacaggatatcctgccgtgcctgcactaaccggcttatcggtcagtttcacctgatttacgtaaaaacccgcttcggcgggtttttgcttttggaggggcagaaagatgaatgactgtccacgacgctatacccaaaagaaa

SEQ ID NO: 218 - DNA, 5122 bp, synthetic construct
  source 1..5122: mol_type = other DNA
aggctaggtggaggctcagtgatgataagtctgcgatggtggatgcatgtgtcatggtcatagctgtttcctgtgtgaaattgttatccgctcagagggcacaatcctattccgcgctatccgacaatctccaagacattaggtggagttcagttcggcgagcggaaatggcttacgaacggggcggagatttcctggaagatgccaggaagatacttaacagggaagtgagagggccgcggcaaagccgtttttccataggctccgcccccctgacaagcatcacgaaatctgacgctcaaatcagtggtggcgaaacccgacaggactataaagataccaggcgtttccccctggcggctccctcgtgcgctctcctgttcctgcctttcggtttaccggtgtcattccgctgttatggccgcgtttgtctcattccacgcctgacactcagttccgggtaggcagttcgctccaagctggactgtatgcacgaaccccccgttcagtccgaccgctgcgccttatccggtaactatcgtcttgagtccaacccggaaagacatgcaaaagcaccactggcagcagccactggtaattgatttagaggagttagtcttgaagtcatgcgccggttaaggctaaactgaaaggacaagttttggtgactgcgctcctccaagccagttacctcggttcaaagagttggtagctcagagaaccttcgaaaaaccgccctgcaaggcggttttttcgttttcagagcaagagattacgcgcagaccaaaacgatctcaagaagatcatcttattaagtctgacgctctattcaacaaagccgccgtccatgggtagggggcttcaaatcgtcctcgtgataccaattcggagcctgcttttttgtacaaacttgttgataatggcaattcaaggatcttcacctagatccttttaaattaaaaatgaagttttaaatcaatctaaagtatatatgagtaaacttggtctgacagttaccaatgcttaatcagtgaggcacctatctcagcgatctgtctatttcgttcatccatagttgcctgactccccgtcgtgtagataactacgatacgggagggcttaccatctggccccagtgctgcaatgataccgcgagagccacgctcaccggctccagatttatcagcaataaaccagccagccggaagggccgagcgcagaagtggtcctgcaactttatccgcctccatccagtctattaattgttgccgggaagctagagtaagtagttcgccagttaatagtttgcgcaacgttgttgccattgctacaggcatcgtggtgtcacgctcgtcgtttggtatggcttcattcagctccggttcccaacgatcaaggcgagttacatgatcccccatgttgtgcaaaaaagcggttagctccttcggtcctccgatcgttgtcagaagtaagttggccgcagtgttatcactcatggttatggcagcactgcataattctcttactgtcatgccatccgtaagatgcttttctgtgactggtgagtactcaaccaagtcattctgagaatagtgtatgcggcgaccgagttgctcttgcccggcgtcaatacgggataataccgcgccacatagcagaactttaaaagtgctcatcattggaaaacgttcttcggggcgaaaactctcaaggatcttaccgctgttgagatccagttcgatgtaacccactcgtgcacccaactgatcttcagcatcttttactttcaccagcgtttctgggtgagcaaaaacaggaaggcaaaatgccgcaaaaaagggaataagggcgacacggaaatgttgaatactcatactcttcctttttcaatattattgaagcatttatcagggttattgtctcatgagcggatacatatttgaatgtatttagaaaaataaacaaataggggttccgcgcacatttccccgaaaagtgccagatacctgaaacaaaacccatcgtacggccaaggaagtctccaataactgtgatccaccacaagcgccagggttttcccagtcacgacgttgtaaaacgacggccagtcatgcataatccgcacgcatctggaataaggaagtgccattccgcctgacctttgcctatgaggaccaaaacgaaaaaacaccctttcgggtgtcttttctggaatttggtaccgagaggctccatgattcagtatgacttgcctttggtcgaaaaaaaaagcccgcactgtcaggtgcgggcttttttctgtgtttccttattaggacccactttcacatttaagttgtttttctaatccgcatatgatcaattcaaggccgaataagaaggctggctctgcaccttggtgatcaaataattcgatagcttgtcgtaataatggcggcatactatcagtagtaggtgtttccctttcttctttagcgacttgatgctcttgatcttccaatacgcaacctaaagtaaaatgccccacagcgctgagtgcatataatgcattctctagtgaaaaaccttgttggcataaaaaggctaattgattttcgagagtttcatactgtttttctgtaggccgtgtacctaaatgtacttttgctccatcgcgatgacttagtaaagcacatctaaaacttttagcgttattacgtaaaaaatcttgccagctttccccttctaaagggcaaaagtgagtatggtgcctatctaacatctcaatggctaaggcgtcgagcaaagcccgcttattttttacatgccaatacaatgtaggctgctctacacctagcttctgggcgagtttacgggttgttaaaccttcgattccgacctcattaagcagctctaatgcgctgttaatcactttacttttatctaatctggacatattcaccaccctgaattgactctcttccgggcgctatcatgccataccgcgaaaggttttgcgccattcgatggcgcgccgccattgcttgtgcaatgtacatcagagattttgagacacaaccaattattgaaggcctccctaacggggggcctttttttgtttctggtcccccgcttaacgatcgttggctgttttcagcaggacgcactgacctccctatcagtgatagagattgacatccctatcagtgatagagatactgagcacagctgtcaccggatgtgctttccggtctgatgagtccgtgaggacgaaacagcctctacaaataattttgtttaaatcacacgggtaaggaggtatttaaatgaaaacactgtcccaagcacagtcgaagacgagtagccagcagttttctttcaccggtaattctagcgctaacgtgattatcggcaaccagaaactaactatcaacgacgtcgcccgcgttgctcggaacgggaccttagtaagcctgactaacaacactgatatacttcaaggcattcaggcgtcctgtgattatatcaataacgcagttgagtctggtgaaccaatttacggtgtgacctcaggcttcggcggtatggcgaacgttgctatcagccgtgaacaggcctccgaactgcaaagtaatttggtatggtttgtcaaaactggtgctgggaacaaactccctttggcggacgtacgtgcagcaatgctgctgcgcgccaactcgcatatgcgtggcgcgtccggtatccgtctggagctgatcaaacgtatggaaatcttcttgaacgctggtgttactccgtacgtttatgaatttggatctatcggcgcttctggagatctggtcccgctgagctacattacgggttccctgattggccttgacccgagcttcaaggtggatttcaacggcaaagaaatggacgccccgaccgcgttacgccagttaaatctgtctcccctgacacttctgcctaaagaagccctagctatgatgaatgggacctcagtcatgactggcatcgcagctaactgcgtatacgacacccagatcctgactgcgattgcaatgggtgttcacgctctggatatccaggccctgaacggcaccaaccagtctttccacccgtttatccataactctaagccgcacccaggtcagctgtgggcggctgatcagatgatatcattgctggctaactcgcaactggtacgggacgagctggacggcaaacatgattaccgcgaccacgagctgatccaggatcgttatagcctgcgttgccttccgcagtacctgggtccgattgtggacggtatctcacagatagcaaaacaaatcgaaattgaaattaactccgttactgataaccctctgattgacgtcgataaccaggcgtcgtaccacggcggaaatttcctgggtcagtatgttggcatgggtatggaccaccttcgctactatatcggcctgctggcgaaacacctggatgtgcagattgcgctgctagctagtcccgaatttagcaacggactgccgccatctttattgggcaaccgtgaacgtaaggttaacatgggtctgaaaggtttacaaatctgtggcaattccatcatgccgctgctgacgttctacggcaatagcatcgccgaccgctttccgacccatgcagagcaattcaaccagaatatcaactctcagggctacacctccgcaacgctggcgcgacgtagtgttgatatcttccaaaactacgttgcgattgccctgatgtttggcgtccaggctgtagacctgaggacttataaaaagactggccattacgatgcgcgtgcttgcctctctccggctaccgaacgcctgtattccgccgtgcgtcacgtagttggtcagaaacctacttcagatcgcccatacatctggaacgataacgagcagggtctggatgaacacatcgctcgcatctccgctgacattgccgctggcggagtaattgttcaagctgtacaggatatcctgccgtgcctgcactaaccggcttatcggtcagtttcacctgatttacgtaaaaacccgcttcggcgggtttttgcttttggaggggcagaaagatgaatgactgtccacgacgctatacccaaaagaaa

SEQ ID NO: 219 - DNA, 5122 bp, synthetic construct
  source 1..5122: mol_type = other DNA
aggctaggtggaggctcagtgatgataagtctgcgatggtggatgcatgtgtcatggtcatagctgtttcctgtgtgaaattgttatccgctcagagggcacaatcctattccgcgctatccgacaatctccaagacattaggtggagttcagttcggcgagcggaaatggcttacgaacggggcggagatttcctggaagatgccaggaagatacttaacagggaagtgagagggccgcggcaaagccgtttttccataggctccgcccccctgacaagcatcacgaaatctgacgctcaaatcagtggtggcgaaacccgacaggactataaagataccaggcgtttccccctggcggctccctcgtgcgctctcctgttcctgcctttcggtttaccggtgtcattccgctgttatggccgcgtttgtctcattccacgcctgacactcagttccgggtaggcagttcgctccaagctggactgtatgcacgaaccccccgttcagtccgaccgctgcgccttatccggtaactatcgtcttgagtccaacccggaaagacatgcaaaagcaccactggcagcagccactggtaattgatttagaggagttagtcttgaagtcatgcgccggttaaggctaaactgaaaggacaagttttggtgactgcgctcctccaagccagttacctcggttcaaagagttggtagctcagagaaccttcgaaaaaccgccctgcaaggcggttttttcgttttcagagcaagagattacgcgcagaccaaaacgatctcaagaagatcatcttattaagtctgacgctctattcaacaaagccgccgtccatgggtagggggcttcaaatcgtcctcgtgataccaattcggagcctgcttttttgtacaaacttgttgataatggcaattcaaggatcttcacctagatccttttaaattaaaaatgaagttttaaatcaatctaaagtatatatgagtaaacttggtctgacagttaccaatgcttaatcagtgaggcacctatctcagcgatctgtctatttcgttcatccatagttgcctgactccccgtcgtgtagataactacgatacgggagggcttaccatctggccccagtgctgcaatgataccgcgagagccacgctcaccggctccagatttatcagcaataaaccagccagccggaagggccgagcgcagaagtggtcctgcaactttatccgcctccatccagtctattaattgttgccgggaagctagagtaagtagttcgccagttaatagtttgcgcaacgttgttgccattgctacaggcatcgtggtgtcacgctcgtcgtttggtatggcttcattcagctccggttcccaacgatcaaggcgagttacatgatcccccatgttgtgcaaaaaagcggttagctccttcggtcctccgatcgttgtcagaagtaagttggccgcagtgttatcactcatggttatggcagcactgcataattctcttactgtcatgccatccgtaagatgcttttctgtgactggtgagtactcaaccaagtcattctgagaatagtgtatgcggcgaccgagttgctcttgcccggcgtcaatacgggataataccgcgccacatagcagaactttaaaagtgctcatcattggaaaacgttcttcggggcgaaaactctcaaggatcttaccgctgttgagatccagttcgatgtaacccactcgtgcacccaactgatcttcagcatcttttactttcaccagcgtttctgggtgagcaaaaacaggaaggcaaaatgccgcaaaaaagggaataagggcgacacggaaatgttgaatactcatactcttcctttttcaatattattgaagcatttatcagggttattgtctcatgagcggatacatatttgaatgtatttagaaaaataaacaaataggggttccgcgcacatttccccgaaaagtgccagatacctgaaacaaaacccatcgtacggccaaggaagtctccaataactgtgatccaccacaagcgccagggttttcccagtcacgacgttgtaaaacgacggccagtcatgcataatccgcacgcatctggaataaggaagtgccattccgcctgacctttgcctatgaggaccaaaacgaaaaaacaccctttcgggtgtcttttctggaatttggtaccgagaggctccatgattcagtatgacttgcctttggtcgaaaaaaaaagcccgcactgtcaggtgcgggcttttttctgtgtttccttattaggacccactttcacatttaagttgtttttctaatccgcatatgatcaattcaaggccgaataagaaggctggctctgcaccttggtgatcaaataattcgatagcttgtcgtaataatggcggcatactatcagtagtaggtgtttccctttcttctttagcgacttgatgctcttgatcttccaatacgcaacctaaagtaaaatgccccacagcgctgagtgcatataatgcattctctagtgaaaaaccttgttggcataaaaaggctaattgattttcgagagtttcatactgtttttctgtaggccgtgtacctaaatgtacttttgctccatcgcgatgacttagtaaagcacatctaaaacttttagcgttattacgtaaaaaatcttgccagctttccccttctaaagggcaaaagtgagtatggtgcctatctaacatctcaatggctaaggcgtcgagcaaagcccgcttattttttacatgccaatacaatgtaggctgctctacacctagcttctgggcgagtttacgggttgttaaaccttcgattccgacctcattaagcagctctaatgcgctgttaatcactttacttttatctaatctggacatattcaccaccctgaattgactctcttccgggcgctatcatgccataccgcgaaaggttttgcgccattcgatggcgcgccgccattgcttgtgcaatgtacatcagagattttgagacacaaccaattattgaaggcctccctaacggggggcctttttttgtttctggtcccccgcttaacgatcgttggctgttttcagcaggacgcactgacctccctatcagtgatagagattgacatccctatcagtgatagagatactgagcacagctgtcaccggatgtgctttccggtctgatgagtccgtgaggacgaaacagcctctacaaataattttgtttaaatcacacgggtaaggaggtatttaaatgaaaacactgtcccaagcacagtcgaagacgagtagccagcagttttctttcaccggtaattctagcgctaacgtgattatcggcaaccagaaactaactatcaacgacgtcgcccgcgttgctcggaacgggaccttagtaagcctgactaacaacactgatatacttcaaggcattcaggcgtcctgtgattatatcaataacgcagttgagtctggtgaaccaatttacggtgtgacctcaggcttcggcggtatggcgaacgttgctatcagccgtgaacaggcctccgaactgcaaaccaatgcggtatggtttacgaaaactggtgctgggaacaaactccctttggcggacgtacgtgcagcaatgctgctgcgcgccaactcgcatatgcgtggcgcgtccggtatccgtctggagctgatcaaacgtatggaaatcttcttgaacgctggtgttactccgtacgtttatgaatttggatctatcggcgcttctggagatctggtcccgctgagctacattacgggttccctgattggccttgacccgagcttcaaggtggatttcaacggcaaagaaatggacgccccgaccgcgttacgccagttaaatctgtctcccctgacacttctgcctaaagaagcgctagctatgatgaatgggacctcagtcatgactggcatcgcagctaactgcgtatacgacacccagatcctgactgcgattgcaatgggtgttcacgctctggatatccaggccctgaacggcaccaaccagtctttccacccgtttatccataactctaagccgcacccaggtcagctgtgggcggctgatcagatgatatcattgctggctaactcgcaactggtacgggacgagctggacggcaaacatgattaccgcgaccacgagctgatccaggatcgttatagcctgcgttgccttccgcagtacctgggtccgattgtggacggtatctcacagatagcaaaacaaatcgaaattgaaattaactccgttactgataaccctctgattgacgtcgataaccaggcgtcgtaccacggcggaaatttcctgggtcagtatgttggcatgggtatggaccaccttcgctactatatcggcctgctggcgaaacacctggatgtgcagattgcgctgctagctagtcccgaatttagcaacggactgccgccatctttattgggcaaccgtgaacgtaaggttaacatgggtctgaaaggtttacaaatctgtggcaattccatcatgccgctgctgacgttctacggcaatagcatcgccgaccgctttccgacccatgcagagcaattcaaccagaatatcaactctcagggctacacctccgcaacgctggcgcgacgtagtgttgatatcttccaaaactacgttgcgattgccctgatgtttggcgtccaggctgtagacctgaggacttataaaaagactggccattacgatgcgcgtgcttgcctctctccggctaccgaacgcctgtattccgccgtgcgtcacgtagttggtcagaaacctacttcagatcgcccatacatctggaacgataacgagcagggtctggatgaacacatcgctcgcatctccgctgacattgccgctggcggagtaattgttcaagctgtacaggatatcctgccgtgcctgcactaaccggcttatcggtcagtttcacctgatttacgtaaaaacccgcttcggcgggtttttgcttttggaggggcagaaagatgaatgactgtccacgacgctatacccaaaagaaa

SEQ ID NO: 220 - DNA, 5122 bp, synthetic construct
  source 1..5122: mol_type = other DNA
aggctaggtggaggctcagtgatgataagtctgcgatggtggatgcatgtgtcatggtcatagctgtttcctgtgtgaaattgttatccgctcagagggcacaatcctattccgcgctatccgacaatctccaagacattaggtggagttcagttcggcgagcggaaatggcttacgaacggggcggagatttcctggaagatgccaggaagatacttaacagggaagtgagagggccgcggcaaagccgtttttccataggctccgcccccctgacaagcatcacgaaatctgacgctcaaatcagtggtggcgaaacccgacaggactataaagataccaggcgtttccccctggcggctccctcgtgcgctctcctgttcctgcctttcggtttaccggtgtcattccgctgttatggccgcgtttgtctcattccacgcctgacactcagttccgggtaggcagttcgctccaagctggactgtatgcacgaaccccccgttcagtccgaccgctgcgccttatccggtaactatcgtcttgagtccaacccggaaagacatgcaaaagcaccactggcagcagccactggtaattgatttagaggagttagtcttgaagtcatgcgccggttaaggctaaactgaaaggacaagttttggtgactgcgctcctccaagccagttacctcggttcaaagagttggtagctcagagaaccttcgaaaaaccgccctgcaaggcggttttttcgttttcagagcaagagattacgcgcagaccaaaacgatctcaagaagatcatcttattaagtctgacgctctattcaacaaagccgccgtccatgggtagggggcttcaaatcgtcctcgtgataccaattcggagcctgcttttttgtacaaacttgttgataatggcaattcaaggatcttcacctagatccttttaaattaaaaatgaagttttaaatcaatctaaagtatatatgagtaaacttggtctgacagttaccaatgcttaatcagtgaggcacctatctcagcgatctgtctatttcgttcatccatagttgcctgactccccgtcgtgtagataactacgatacgggagggcttaccatctggccccagtgctgcaatgataccgcgagagccacgctcaccggctccagatttatcagcaataaaccagccagccggaagggccgagcgcagaagtggtcctgcaactttatccgcctccatccagtctattaattgttgccgggaagctagagtaagtagttcgccagttaatagtttgcgcaacgttgttgccattgctacaggcatcgtggtgtcacgctcgtcgtttggtatggcttcattcagctccggttcccaacgatcaaggcgagttacatgatcccccatgttgtgcaaaaaagcggttagctccttcggtcctccgatcgttgtcagaagtaagttggccgcagtgttatcactcatggttatggcagcactgcataattctcttactgtcatgccatccgtaagatgcttttctgtgactggtgagtactcaaccaagtcattctgagaatagtgtatgcggcgaccgagttgctcttgcccggcgtcaatacgggataataccgcgccacatagcagaactttaaaagtgctcatcattggaaaacgttcttcggggcgaaaactctcaaggatcttaccgctgttgagatccagttcgatgtaacccactcgtgcacccaactgatcttcagcatcttttactttcaccagcgtttctgggtgagcaaaaacaggaaggcaaaatgccgcaaaaaagggaataagggcgacacggaaatgttgaatactcatactcttcctttttcaatattattgaagcatttatcagggttattgtctcatgagcggatacatatttgaatgtatttagaaaaataaacaaataggggttccgcgcacatttccccgaaaagtgccagatacctgaaacaaaacccatcgtacggccaaggaagtctccaataactgtgatccaccacaagcgccagggttttcccagtcacgacgttgtaaaacgacggccagtcatgcataatccgcacgcatctggaataaggaagtgccattccgcctgacctttgcctatgaggaccaaaacgaaaaaacaccctttcgggtgtcttttctggaatttggtaccgagaggctccatgattcagtatgacttgcctttggtcgaaaaaaaaagcccgcactgtcaggtgcgggcttttttctgtgtttccttattaggacccactttcacatttaagttgtttttctaatccgcatatgatcaattcaaggccgaataagaaggctggctctgcaccttggtgatcaaataattcgatagcttgtcgtaataatggcggcatactatcagtagtaggtgtttccctttcttctttagcgacttgatgctcttgatcttccaatacgcaacctaaagtaaaatgccccacagcgctgagtgcatataatgcattctctagtgaaaaaccttgttggcataaaaaggctaattgattttcgagagtttcatactgtttttctgtaggccgtgtacctaaatgtacttttgctccatcgcgatgacttagtaaagcacatctaaaacttttagcgttattacgtaaaaaatcttgccagctttccccttctaaagggcaaaagtgagtatggtgcctatctaacatctcaatggctaaggcgtcgagcaaagcccgcttattttttacatgccaatacaatgtaggctgctctacacctagcttctgggcgagtttacgggttgttaaaccttcgattccgacctcattaagcagctctaatgcgctgttaatcactttacttttatctaatctggacatattcaccaccctgaattgactctcttccgggcgctatcatgccataccgcgaaaggttttgcgccattcgatggcgcgccgccattgcttgtgcaatgtacatcagagattttgagacacaaccaattattgaaggcctccctaacggggggcctttttttgtttctggtcccccgcttaacgatcgttggctgttttcagcaggacgcactgacctccctatcagtgatagagattgacatccctatcagtgatagagatactgagcacagctgtcaccggatgtgctttccggtctgatgagtccgtgaggacgaaacagcctctacaaataattttgtttaaatcacacgggtaaggaggtatttaaatgaaaacactgtcccaagcacagtcgaagacgagtagccagcagttttctttcaccggtaattctagcgctaacgtgattatcggcaaccagaaactaactatcaacgacgtcgcccgcgttgctcggaacgggaccttagtaagcctgactaacaacactgatatacttcaaggcattcaggcgtcctgtgattatatcaataacgcagttgagtctggtgaaccaatttacggtgtgacctcaggcttcggcggtatggcgaacgttgctatcagccgtgaacaggcctccgaactgcaaaccaatgtcgtatggtttacgaaaactggtgctgggaacaaactccctttggcggacgtacgtgcagcaatgctgctgcgcgccaactcgcatatgcgtggcgcgtccggtatccgtctggagctgatcaaacgtatggaaatcttcttgaacgctggtgttactccgtacgtttatgaatttggatctatcggcgcttctggagatctggtcccgctgagctacattacgggttccctgattggccttgacccgagcttcaaggtggatttcaacggcaaagaaatggacgccccgaccgcgttacgccagttaaatctgtctcccctgacacttctgcctaaagaaggtctagctatgatgaatgggacctcagtcatgactggcatcgcagctaactgcgtatacgacacccagatcctgactgcgattgcaatgggtgttcacgctctggatatccaggccctgaacggcaccaaccagtctttccacccgtttatccataactctaagccgcacccaggtcagctgtgggcggctgatcagatgatatcattgctggctaactcgcaactggtacgggacgagctggacggcaaacatgattaccgcgaccacgagctgatccaggatcgttatagcctgcgttgccttccgcagtacctgggtccgattgtggacggtatctcacagatagcaaaacaaatcgaaattgaaattaactccgttactgataaccctctgattgacgtcgataaccaggcgtcgtaccacggcggaaatttcctgggtcagtatgttggcatgggtatggaccaccttcgctactatatcggcctgctggcgaaacacctggatgtgcagattgcgctgctagctagtcccgaatttagcaacggactgccgccatctttattgggcaaccgtgaacgtaaggttaacatgggtctgaaaggtttacaaatctgtggcaattccatcatgccgctgctgacgttctacggcaatagcatcgccgaccgctttccgacccatgcagagcaattcaaccagaatatcaactctcagggctacacctccgcaacgctggcgcgacgtagtgttgatatcttccaaaactacgttgcgattgccctgatgtttggcgtccaggctgtagacctgaggacttataaaaagactggccattacgatgcgcgtgcttgcctctctccggctaccgaacgcctgtattccgccgtgcgtcacgtagttggtcagaaacctacttcagatcgcccatacatctggaacgataacgagcagggtctggatgaacacatcgctcgcatctccgctgacattgccgctggcggagtaattgttcaagctgtacaggatatcctgccgtgcctgcactaaccggcttatcggtcagtttcacctgatttacgtaaaaacccgcttcggcgggtttttgcttttggaggggcagaaagatgaatgactgtccacgacgctatacccaaaagaaa

SEQ ID NO: 221 - DNA, 5122 bp, synthetic construct
  source 1..5122: mol_type = other DNA
aggctaggtggaggctcagtgatgataagtctgcgatggtggatgcatgtgtcatggtcatagctgtttcctgtgtgaaattgttatccgctcagagggcacaatcctattccgcgctatccgacaatctccaagacattaggtggagttcagttcggcgagcggaaatggcttacgaacggggcggagatttcctggaagatgccaggaagatacttaacagggaagtgagagggccgcggcaaagccgtttttccataggctccgcccccctgacaagcatcacgaaatctgacgctcaaatcagtggtggcgaaacccgacaggactataaagataccaggcgtttccccctggcggctccctcgtgcgctctcctgttcctgcctttcggtttaccggtgtcattccgctgttatggccgcgtttgtctcattccacgcctgacactcagttccgggtaggcagttcgctccaagctggactgtatgcacgaaccccccgttcagtccgaccgctgcgccttatccggtaactatcgtcttgagtccaacccggaaagacatgcaaaagcaccactggcagcagccactggtaattgatttagaggagttagtcttgaagtcatgcgccggttaaggctaaactgaaaggacaagttttggtgactgcgctcctccaagccagttacctcggttcaaagagttggtagctcagagaaccttcgaaaaaccgccctgcaaggcggttttttcgttttcagagcaagagattacgcgcagaccaaaacgatctcaagaagatcatcttattaagtctgacgctctattcaacaaagccgccgtccatgggtagggggcttcaaatcgtcctcgtgataccaattcggagcctgcttttttgtacaaacttgttgataatggcaattcaaggatcttcacctagatccttttaaattaaaaatgaagttttaaatcaatctaaagtatatatgagtaaacttggtctgacagttaccaatgcttaatcagtgaggcacctatctcagcgatctgtctatttcgttcatccatagttgcctgactccccgtcgtgtagataactacgatacgggagggcttaccatctggccccagtgctgcaatgataccgcgagagccacgctcaccggctccagatttatcagcaataaaccagccagccggaagggccgagcgcagaagtggtcctgcaactttatccgcctccatccagtctattaattgttgccgggaagctagagtaagtagttcgccagttaatagtttgcgcaacgttgttgccattgctacaggcatcgtggtgtcacgctcgtcgtttggtatggcttcattcagctccggttcccaacgatcaaggcgagttacatgatcccccatgttgtgcaaaaaagcggttagctccttcggtcctccgatcgttgtcagaagtaagttggccgcagtgttatcactcatggttatggcagcactgcataattctcttactgtcatgccatccgtaagatgcttttctgtgactggtgagtactcaaccaagtcattctgagaatagtgtatgcggcgaccgagttgctcttgcccggcgtcaatacgggataataccgcgccacatagcagaactttaaaagtgctcatcattggaaaacgttcttcggggcgaaaactctcaaggatcttaccgctgttgagatccagttcgatgtaacccactcgtgcacccaactgatcttcagcatcttttactttcaccagcgtttctgggtgagcaaaaacaggaaggcaaaatgccgcaaaaaagggaataagggcgacacggaaatgttgaatactcatactcttcctttttcaatattattgaagcatttatcagggttattgtctcatgagcggatacatatttgaatgtatttagaaaaataaacaaataggggttccgcgcacatttccccgaaaagtgccagatacctgaaacaaaacccatcgtacggccaaggaagtctccaataactgtgatccaccacaagcgccagggttttcccagtcacgacgttgtaaaacgacggccagtcatgcataatccgcacgcatctggaataaggaagtgccattccgcctgacctttgcctatgaggaccaaaacgaaaaaacaccctttcgggtgtcttttctggaatttggtaccgagaggctccatgattcagtatgacttgcctttggtcgaaaaaaaaagcccgcactgtcaggtgcgggcttttttctgtgtttccttattaggacccactttcacatttaagttgtttttctaatccgcatatgatcaattcaaggccgaataagaaggctggctctgcaccttggtgatcaaataattcgatagcttgtcgtaataatggcggcatactatcagtagtaggtgtttccctttcttctttagcgacttgatgctcttgatcttccaatacgcaacctaaagtaaaatgccccacagcgctgagtgcatataatgcattctctagtgaaaaaccttgttggcataaaaaggctaattgattttcgagagtttcatactgtttttctgtaggccgtgtacctaaatgtacttttgctccatcgcgatgacttagtaaagcacatctaaaacttttagcgttattacgtaaaaaatcttgccagctttccccttctaaagggcaaaagtgagtatggtgcctatctaacatctcaatggctaaggcgtcgagcaaagcccgcttattttttacatgccaatacaatgtaggctgctctacacctagcttctgggcgagtttacgggttgttaaaccttcgattccgacctcattaagcagctctaatgcgctgttaatcactttacttttatctaatctggacatattcaccaccctgaattgactctcttccgggcgctatcatgccataccgcgaaaggttttgcgccattcgatggcgcgccgccattgcttgtgcaatgtacatcagagattttgagacacaaccaattattgaaggcctccctaacggggggcctttttttgtttctggtcccccgcttaacgatcgttggctgttttcagcaggacgcactgacctccctatcagtgatagagattgacatccctatcagtgatagagatactgagcacagctgtcaccggatgtgctttccggtctgatgagtccgtgaggacgaaacagcctctacaaataattttgtttaaatcacacgggtaaggaggtatttaaatgaaaacactgtcccaagcacagtcgaagacgagtagccagcagttttctttcaccggtaattctagcgctaacgtgattatcggcaaccagaaactaactatcaacgacgtcgcccgcgttgctcggaacgggaccttagtaagcctgactaacaacactgatatacttcaaggcattcaggcgtcctgtgattatatcaataacgcagttgagtctggtgaaccaatttacggtgtgacctcaggcttcggcggtatggcgaacgttgctatcagccgtgaacaggcctccgaactgcaaaagaatttggtatggtttgtgaaaactggtgctgggaacaaactccctttggcggacgtacgtgcagcaatgctgctgcgcgccaactcgcatatgcgtggcgcgtccggtatccgtctggagctgatcaaacgtatggaaatcttcttgaacgctggtgttactccgtacgtttatgaatttggatctatcggcgcttctggagatctggtcccgctgagctacattacgggttccctgattggccttgacccgagcttcaaggtggatttcaacggcaaagaaatggacgccccgaccgcgttacgccagttaaatctgtctcccctgacacttctgcctaaagaaggtctagctatgctcaatgggacctcagtcatgactggcatcgcagctaactgcgtatacgacacccagatcctgactgcgattgcaatgggtgttcacgctctggatatccaggccctgaacggcaccaaccagtctttccacccgtttatccataactctaagccgcacccaggtcagctgtgggcggctgatcagatgatatcattgctggctaactcgcaactggtacgggacgagctggacggcaaacatgattaccgcgaccacgagctgatccaggatcgttatagcctgcgttgccttccgcagtacctgggtccgattgtggacggtatctcacagatagcaaaacaaatcgaaattgaaattaactccgttactgataaccctctgattgacgtcgataaccaggcgtcgtaccacggcggaaatttcctgggtcagtatgttggcatgggtatggaccaccttcgctactatatcggcctgctggcgaaacacctggatgtgcagattgcgctgctagctagtcccgaatttagcaacggactgccgccatctttattgggcaaccgtgaacgtaaggttaacatgggtctgaaaggtttacaaatctgtggcaattccatcatgccgctgctgacgttctacggcaatagcatcgccgaccgctttccgacccatgcagagcaattcaaccagaatatcaactctcagggctacacctccgcaacgctggcgcgacgtagtgttgatatcttccaaaactacgttgcgattgccctgatgtttggcgtccaggctgtagacctgaggacttataaaaagactggccattacgatgcgcgtgcttgcctctctccggctaccgaacgcctgtattccgccgtgcgtcacgtagttggtcagaaacctacttcagatcgcccatacatctggaacgataacgagcagggtctggatgaacacatcgctcgcatctccgctgacattgccgctggcggagtaattgttcaagctgtacaggatatcctgccgtgcctgcactaaccggcttatcggtcagtttcacctgatttacgtaaaaacccgcttcggcgggtttttgcttttggaggggcagaaagatgaatgactgtccacgacgctatacccaaaagaaa

SEQ ID NO: 222 - DNA, 5122 bp, synthetic construct
  source 1..5122: mol_type = other DNA
aggctaggtggaggctcagtgatgataagtctgcgatggtggatgcatgtgtcatggtcatagctgtttcctgtgtgaaattgttatccgctcagagggcacaatcctattccgcgctatccgacaatctccaagacattaggtggagttcagttcggcgagcggaaatggcttacgaacggggcggagatttcctggaagatgccaggaagatacttaacagggaagtgagagggccgcggcaaagccgtttttccataggctccgcccccctgacaagcatcacgaaatctgacgctcaaatcagtggtggcgaaacccgacaggactataaagataccaggcgtttccccctggcggctccctcgtgcgctctcctgttcctgcctttcggtttaccggtgtcattccgctgttatggccgcgtttgtctcattccacgcctgacactcagttccgggtaggcagttcgctccaagctggactgtatgcacgaaccccccgttcagtccgaccgctgcgccttatccggtaactatcgtcttgagtccaacccggaaagacatgcaaaagcaccactggcagcagccactggtaattgatttagaggagttagtcttgaagtcatgcgccggttaaggctaaactgaaaggacaagttttggtgactgcgctcctccaagccagttacctcggttcaaagagttggtagctcagagaaccttcgaaaaaccgccctgcaaggcggttttttcgttttcagagcaagagattacgcgcagaccaaaacgatctcaagaagatcatcttattaagtctgacgctctattcaacaaagccgccgtccatgggtagggggcttcaaatcgtcctcgtgataccaattcggagcctgcttttttgtacaaacttgttgataatggcaattcaaggatcttcacctagatccttttaaattaaaaatgaagttttaaatcaatctaaagtatatatgagtaaacttggtctgacagttaccaatgcttaatcagtgaggcacctatctcagcgatctgtctatttcgttcatccatagttgcctgactccccgtcgtgtagataactacgatacgggagggcttaccatctggccccagtgctgcaatgataccgcgagagccacgctcaccggctccagatttatcagcaataaaccagccagccggaagggccgagcgcagaagtggtcctgcaactttatccgcctccatccagtctattaattgttgccgggaagctagagtaagtagttcgccagttaatagtttgcgcaacgttgttgccattgctacaggcatcgtggtgtcacgctcgtcgtttggtatggcttcattcagctccggttcccaacgatcaaggcgagttacatgatcccccatgttgtgcaaaaaagcggttagctccttcggtcctccgatcgttgtcagaagtaagttggccgcagtgttatcactcatggttatggcagcactgcataattctcttactgtcatgccatccgtaagatgcttttctgtgactggtgagtactcaaccaagtcattctgagaatagtgtatgcggcgaccgagttgctcttgcccggcgtcaatacgggataataccgcgccacatagcagaactttaaaagtgctcatcattggaaaacgttcttcggggcgaaaactctcaaggatcttaccgctgttgagatccagttcgatgtaacccactcgtgcacccaactgatcttcagcatcttttactttcaccagcgtttctgggtgagcaaaaacaggaaggcaaaatgccgcaaaaaagggaataagggcgacacggaaatgttgaatactcatactcttcctttttcaatattattgaagcatttatcagggttattgtctcatgagcggatacatatttgaatgtatttagaaaaataaacaaataggggttccgcgcacatttccccgaaaagtgccagatacctgaaacaaaacccatcgtacggccaaggaagtctccaataactgtgatccaccacaagcgccagggttttcccagtcacgacgttgtaaaacgacggccagtcatgcataatccgcacgcatctggaataaggaagtgccattccgcctgacctttgcctatgaggaccaaaacgaaaaaacaccctttcgggtgtcttttctggaatttggtaccgagaggctccatgattcagtatgacttgcctttggtcgaaaaaaaaagcccgcactgtcaggtgcgggcttttttctgtgtttccttattaggacccactttcacatttaagttgtttttctaatccgcatatgatcaattcaaggccgaataagaaggctggctctgcaccttggtgatcaaataattcgatagcttgtcgtaataatggcggcatactatcagtagtaggtgtttccctttcttctttagcgacttgatgctcttgatcttccaatacgcaacctaaagtaaaatgccccacagcgctgagtgcatataatgcattctctagtgaaaaaccttgttggcataaaaaggctaattgattttcgagagtttcatactgtttttctgtaggccgtgtacctaaatgtacttttgctccatcgcgatgacttagtaaagcacatctaaaacttttagcgttattacgtaaaaaatcttgccagctttccccttctaaagggcaaaagtgagtatggtgcctatctaacatctcaatggctaaggcgtcgagcaaagcccgcttattttttacatgccaatacaatgtaggctgctctacacctagcttctgggcgagtttacgggttgttaaaccttcgattccgacctcattaagcagctctaatgcgctgttaatcactttacttttatctaatctggacatattcaccaccctgaattgactctcttccgggcgctatcatgccataccgcgaaaggttttgcgccattcgatggcgcgccgccattgcttgtgcaatgtacatcagagattttgagacacaaccaattattgaaggcctccctaacggggggcctttttttgtttctggtcccccgcttaacgatcgttggctgttttcagcaggacgcactgacctccctatcagtgatagagattgacatccctatcagtgatagagatactgagcacagctgtcaccggatgtgctttccggtctgatgagtccgtgaggacgaaacagcctctacaaataattttgtttaaatcacacgggtaaggaggtatttaaatgaaaacactgtcccaagcacagtcgaagacgagtagccagcagttttctttcaccggtaattctagcgctaacgtgattatcggcaaccagaaactaactatcaacgacgtcgcccgcgttgctcggaacgggaccttagtaagcctgactaacaacactgatatacttcaaggcattcaggcgtcctgtgattatatcaataacgcagttgagtctggtgaaccaatttacggtgtgacctcaggcttcggcggtatggcgaacgttgctatcagccgtgaacaggcctccgaactgcaaaccaatgcggtatggtttcagaaaactggtgctgggaacaaactccctttggcggacgtacgtgcagcaatgctgctgcgcgccaactcgcatatgcgtggcgcgtccggtatccgtctggagctgatcaaacgtatggaaatcttcttgaacgctggtgttactccgtacgtttatgaatttggatctatcggcgcttctggagatctggtcccgctgagctacattacgggttccctgattggccttgacccgagcttcaaggtggatttcaacggcaaagaaatggacgccccgaccgcgttacgccagttaaatctgtctcccctgacacttctgcctaaagaaggtattgctatgaataatgggacctcagtcatgactggcatcgcagctaactgcgtatacgacacccagatcctgactgcgattgcaatgggtgttcacgctctggatatccaggccctgaacggcaccaaccagtctttccacccgtttatccataactctaagccgcacccaggtcagctgtgggcggctgatcagatgatatcattgctggctaactcgcaactggtacgggacgagctggacggcaaacatgattaccgcgaccacgagctgatccaggatcgttatagcctgcgttgccttccgcagtacctgggtccgattgtggacggtatctcacagatagcaaaacaaatcgaaattgaaattaactccgttactgataaccctctgattgacgtcgataaccaggcgtcgtaccacggcggaaatttcctgggtcagtatgttggcatgggtatggaccaccttcgctactatatcggcctgctggcgaaacacctggatgtgcagattgcgctgctagctagtcccgaatttagcaacggactgccgccatctttattgggcaaccgtgaacgtaaggttaacatgggtctgaaaggtttacaaatctgtggcaattccatcatgccgctgctgacgttctacggcaatagcatcgccgaccgctttccgacccatgcagagcaattcaaccagaatatcaactctcagggctacacctccgcaacgctggcgcgacgtagtgttgatatcttccaaaactacgttgcgattgccctgatgtttggcgtccaggctgtagacctgaggacttataaaaagactggccattacgatgcgcgtgcttgcctctctccggctaccgaacgcctgtattccgccgtgcgtcacgtagttggtcagaaacctacttcagatcgcccatacatctggaacgataacgagcagggtctggatgaacacatcgctcgcatctccgctgacattgccgctggcggagtaattgttcaagctgtacaggatatcctgccgtgcctgcactaaccggcttatcggtcagtttcacctgatttacgtaaaaacccgcttcggcgggtttttgcttttggaggggcagaaagatgaatgactgtccacgacgctatacccaaaagaaa

SEQ ID NO: 223 - DNA, 5122 bp, synthetic construct
  source 1..5122: mol_type = other DNA
aggctaggtggaggctcagtgatgataagtctgcgatggtggatgcatgtgtcatggtcatagctgtttcctgtgtgaaattgttatccgctcagagggcacaatcctattccgcgctatccgacaatctccaagacattaggtggagttcagttcggcgagcggaaatggcttacgaacggggcggagatttcctggaagatgccaggaagatacttaacagggaagtgagagggccgcggcaaagccgtttttccataggctccgcccccctgacaagcatcacgaaatctgacgctcaaatcagtggtggcgaaacccgacaggactataaagataccaggcgtttccccctggcggctccctcgtgcgctctcctgttcctgcctttcggtttaccggtgtcattccgctgttatggccgcgtttgtctcattccacgcctgacactcagttccgggtaggcagttcgctccaagctggactgtatgcacgaaccccccgttcagtccgaccgctgcgccttatccggtaactatcgtcttgagtccaacccggaaagacatgcaaaagcaccactggcagcagccactggtaattgatttagaggagttagtcttgaagtcatgcgccggttaaggctaaactgaaaggacaagttttggtgactgcgctcctccaagccagttacctcggttcaaagagttggtagctcagagaaccttcgaaaaaccgccctgcaaggcggttttttcgttttcagagcaagagattacgcgcagaccaaaacgatctcaagaagatcatcttattaagtctgacgctctattcaacaaagccgccgtccatgggtagggggcttcaaatcgtcctcgtgataccaattcggagcctgcttttttgtacaaacttgttgataatggcaattcaaggatcttcacctagatccttttaaattaaaaatgaagttttaaatcaatctaaagtatatatgagtaaacttggtctgacagttaccaatgcttaatcagtgaggcacctatctcagcgatctgtctatttcgttcatccatagttgcctgactccccgtcgtgtagataactacgatacgggagggcttaccatctggccccagtgctgcaatgataccgcgagagccacgctcaccggctccagatttatcagcaataaaccagccagccggaagggccgagcgcagaagtggtcctgcaactttatccgcctccatccagtctattaattgttgccgggaagctagagtaagtagttcgccagttaatagtttgcgcaacgttgttgccattgctacaggcatcgtggtgtcacgctcgtcgtttggtatggcttcattcagctccggttcccaacgatcaaggcgagttacatgatcccccatgttgtgcaaaaaagcggttagctccttcggtcctccgatcgttgtcagaagtaagttggccgcagtgttatcactcatggttatggcagcactgcataattctcttactgtcatgccatccgtaagatgcttttctgtgactggtgagtactcaaccaagtcattctgagaatagtgtatgcggcgaccgagttgctcttgcccggcgtcaatacgggataataccgcgccacatagcagaactttaaaagtgctcatcattggaaaacgttcttcggggcgaaaactctcaaggatcttaccgctgttgagatccagttcgatgtaacccactcgtgcacccaactgatcttcagcatcttttactttcaccagcgtttctgggtgagcaaaaacaggaaggcaaaatgccgcaaaaaagggaataagggcgacacggaaatgttgaatactcatactcttcctttttcaatattattgaagcatttatcagggttattgtctcatgagcggatacatatttgaatgtatttagaaaaataaacaaataggggttccgcgcacatttccccgaaaagtgccagatacctgaaacaaaacccatcgtacggccaaggaagtctccaataactgtgatccaccacaagcgccagggttttcccagtcacgacgttgtaaaacgacggccagtcatgcataatccgcacgcatctggaataaggaagtgccattccgcctgacctttgcctatgaggaccaaaacgaaaaaacaccctttcgggtgtcttttctggaatttggtaccgagaggctccatgattcagtatgacttgcctttggtcgaaaaaaaaagcccgcactgtcaggtgcgggcttttttctgtgtttccttattaggacccactttcacatttaagttgtttttctaatccgcatatgatcaattcaaggccgaataagaaggctggctctgcaccttggtgatcaaataattcgatagcttgtcgtaataatggcggcatactatcagtagtaggtgtttccctttcttctttagcgacttgatgctcttgatcttccaatacgcaacctaaagtaaaatgccccacagcgctgagtgcatataatgcattctctagtgaaaaaccttgttggcataaaaaggctaattgattttcgagagtttcatactgtttttctgtaggccgtgtacctaaatgtacttttgctccatcgcgatgacttagtaaagcacatctaaaacttttagcgttattacgtaaaaaatcttgccagctttccccttctaaagggcaaaagtgagtatggtgcctatctaacatctcaatggctaaggcgtcgagcaaagcccgcttattttttacatgccaatacaatgtaggctgctctacacctagcttctgggcgagtttacgggttgttaaaccttcgattccgacctcattaagcagctctaatgcgctgttaatcactttacttttatctaatctggacatattcaccaccctgaattgactctcttccgggcgctatcatgccataccgcgaaaggttttgcgccattcgatggcgcgccgccattgcttgtgcaatgtacatcagagattttgagacacaaccaattattgaaggcctccctaacggggggcctttttttgtttctggtcccccgcttaacgatcgttggctgttttcagcaggacgcactgacctccctatcagtgatagagattgacatccctatcagtgatagagatactgagcacagctgtcaccggatgtgctttccggtctgatgagtccgtgaggacgaaacagcctctacaaataattttgtttaaatcacacgggtaaggaggtatttaaatgaaaacactgtcccaagcacagtcgaagacgagtagccagcagttttctttcaccggtaattctagcgctaacgtgattatcggcaaccagaaactaactatcaacgacgtcgcccgcgttgctcggaacgggaccttagtaagcctgactaacaacactgatatacttcaaggcattcaggcgtcctgtgattatatcaataacgcagttgagtctggtgaaccaatttacggtgtgacctcaggcttcggcggtatggcgaacgttgctatcagccgtgaacaggcctccgaactgcaaagtaatttggtatggtttcaaaaaactggtgctgggaacaaactccctttggcggacgtacgtgcagcaatgctgctgcgcgccaactcgcatatgcgtggcgcgtccggtatccgtctggagctgatcaaacgtatggaaatcttcttgaacgctggtgttactccgtacgtttatgaatttggatctatcggcgcttctggagatctggtcccgctgagctacattacgggttccctgattggccttgacccgagcttcaaggtggatttcaacggcaaagaaatggacgccccgaccgcgttacgccagttaaatctgtctcccctgacacttctgcctaaagaagcgattgctatgatgaatgggacctcagtcatgactggcatcgcagctaactgcgtatacgacacccagatcctgactgcgattgcaatgggtgttcacgctctggatatccaggccctgaacggcaccaaccagtctttccacccgtttatccataactctaagccgcacccaggtcagctgtgggcggctgatcagatgatatcattgctggctaactcgcaactggtacgggacgagctggacggcaaacatgattaccgcgaccacgagctgatccaggatcgttatagcctgcgttgccttccgcagtacctgggtccgattgtggacggtatctcacagatagcaaaacaaatcgaaattgaaattaactccgttactgataaccctctgattgacgtcgataaccaggcgtcgtaccacggcggaaatttcctgggtcagtatgttggcatgggtatggaccaccttcgctactatatcggcctgctggcgaaacacctggatgtgcagattgcgctgctagctagtcccgaatttagcaacggactgccgccatctttattgggcaaccgtgaacgtaaggttaacatgggtctgaaaggtttacaaatctgtggcaattccatcatgccgctgctgacgttctacggcaatagcatcgccgaccgctttccgacccatgcagagcaattcaaccagaatatcaactctcagggctacacctccgcaacgctggcgcgacgtagtgttgatatcttccaaaactacgttgcgattgccctgatgtttggcgtccaggctgtagacctgaggacttataaaaagactggccattacgatgcgcgtgcttgcctctctccggctaccgaacgcctgtattccgccgtgcgtcacgtagttggtcagaaacctacttcagatcgcccatacatctggaacgataacgagcagggtctggatgaacacatcgctcgcatctccgctgacattgccgctggcggagtaattgttcaagctgtacaggatatcctgccgtgcctgcactaaccggcttatcggtcagtttcacctgatttacgtaaaaacccgcttcggcgggtttttgcttttggaggggcagaaagatgaatgactgtccacgacgctatacccaaaagaaa

SEQ ID NO: 224 - DNA, 5122 bp, synthetic construct
  source 1..5122: mol_type = other DNA
aggctaggtggaggctcagtgatgataagtctgcgatggtggatgcatgtgtcatggtcatagctgtttcctgtgtgaaattgttatccgctcagagggcacaatcctattccgcgctatccgacaatctccaagacattaggtggagttcagttcggcgagcggaaatggcttacgaacggggcggagatttcctggaagatgccaggaagatacttaacagggaagtgagagggccgcggcaaagccgtttttccataggctccgcccccctgacaagcatcacgaaatctgacgctcaaatcagtggtggcgaaacccgacaggactataaagataccaggcgtttccccctggcggctccctcgtgcgctctcctgttcctgcctttcggtttaccggtgtcattccgctgttatggccgcgtttgtctcattccacgcctgacactcagttccgggtaggcagttcgctccaagctggactgtatgcacgaaccccccgttcagtccgaccgctgcgccttatccggtaactatcgtcttgagtccaacccggaaagacatgcaaaagcaccactggcagcagccactggtaattgatttagaggagttagtcttgaagtcatgcgccggttaaggctaaactgaaaggacaagttttggtgactgcgctcctccaagccagttacctcggttcaaagagttggtagctcagagaaccttcgaaaaaccgccctgcaaggcggttttttcgttttcagagcaagagattacgcgcagaccaaaacgatctcaagaagatcatcttattaagtctgacgctctattcaacaaagccgccgtccatgggtagggggcttcaaatcgtcctcgtgataccaattcggagcctgcttttttgtacaaacttgttgataatggcaattcaaggatcttcacctagatccttttaaattaaaaatgaagttttaaatcaatctaaagtatatatgagtaaacttggtctgacagttaccaatgcttaatcagtgaggcacctatctcagcgatctgtctatttcgttcatccatagttgcctgactccccgtcgtgtagataactacgatacgggagggcttaccatctggccccagtgctgcaatgataccgcgagagccacgctcaccggctccagatttatcagcaataaaccagccagccggaagggccgagcgcagaagtggtcctgcaactttatccgcctccatccagtctattaattgttgccgggaagctagagtaagtagttcgccagttaatagtttgcgcaacgttgttgccattgctacaggcatcgtggtgtcacgctcgtcgtttggtatggcttcattcagctccggttcccaacgatcaaggcgagttacatgatcccccatgttgtgcaaaaaagcggttagctccttcggtcctccgatcgttgtcagaagtaagttggccgcagtgttatcactcatggttatggcagcactgcataattctcttactgtcatgccatccgtaagatgcttttctgtgactggtgagtactcaaccaagtcattctgagaatagtgtatgcggcgaccgagttgctcttgcccggcgtcaatacgggataataccgcgccacatagcagaactttaaaagtgctcatcattggaaaacgttcttcggggcgaaaactctcaaggatcttaccgctgttgagatccagttcgatgtaacccactcgtgcacccaactgatcttcagcatcttttactttcaccagcgtttctgggtgagcaaaaacaggaaggcaaaatgccgcaaaaaagggaataagggcgacacggaaatgttgaatactcatactcttcctttttcaatattattgaagcatttatcagggttattgtctcatgagcggatacatatttgaatgtatttagaaaaataaacaaataggggttccgcgcacatttccccgaaaagtgccagatacctgaaacaaaacccatcgtacggccaaggaagtctccaataactgtgatccaccacaagcgccagggttttcccagtcacgacgttgtaaaacgacggccagtcatgcataatccgcacgcatctggaataaggaagtgccattccgcctgacctttgcctatgaggaccaaaacgaaaaaacaccctttcgggtgtcttttctggaatttggtaccgagaggctccatgattcagtatgacttgcctttggtcgaaaaaaaaagcccgcactgtcaggtgcgggcttttttctgtgtttccttattaggacccactttcacatttaagttgtttttctaatccgcatatgatcaattcaaggccgaataagaaggctggctctgcaccttggtgatcaaataattcgatagcttgtcgtaataatggcggcatactatcagtagtaggtgtttccctttcttctttagcgacttgatgctcttgatcttccaatacgcaacctaaagtaaaatgccccacagcgctgagtgcatataatgcattctctagtgaaaaaccttgttggcataaaaaggctaattgattttcgagagtttcatactgtttttctgtaggccgtgtacctaaatgtacttttgctccatcgcgatgacttagtaaagcacatctaaaacttttagcgttattacgtaaaaaatcttgccagctttccccttctaaagggcaaaagtgagtatggtgcctatctaacatctcaatggctaaggcgtcgagcaaagcccgcttattttttacatgccaatacaatgtaggctgctctacacctagcttctgggcgagtttacgggttgttaaaccttcgattccgacctcattaagcagctctaatgcgctgttaatcactttacttttatctaatctggacatattcaccaccctgaattgactctcttccgggcgctatcatgccataccgcgaaaggttttgcgccattcgatggcgcgccgccattgcttgtgcaatgtacatcagagattttgagacacaaccaattattgaaggcctccctaacggggggcctttttttgtttctggtcccccgcttaacgatcgttggctgttttcagcaggacgcactgacctccctatcagtgatagagattgacatccctatcagtgatagagatactgagcacagctgtcaccggatgtgctttccggtctgatgagtccgtgaggacgaaacagcctctacaaataattttgtttaaatcacacgggtaaggaggtatttaaatgaaaacactgtcccaagcacagtcgaagacgagtagccagcagttttctttcaccggtaattctagcgctaacgtgattatcggcaaccagaaactaactatcaacgacgtcgcccgcgttgctcggaacgggaccttagtaagcctgactaacaacactgatatacttcaaggcattcaggcgtcctgtgattatatcaataacgcagttgagtctggtgaaccaatttacggtgtgacctcaggcttcggcggtatggcgaacgttgctatcagccgtgaacaggcctccgaactgcaacacaatatggtatggtttatgaaaactggtgctgggaacaaactccctttggcggacgtacgtgcagcaatgctgctgcgcgccaactcgcatatgcgtggcgcgtccggtatccgtctggagctgatcaaacgtatggaaatcttcttgaacgctggtgttactccgtacgtttatgaatttggatctatcggcgcttctggagatctggtcccgctgagctacattacgggttccctgattggccttgacccgagcttcaaggtggatttcaacggcaaagaaatggacgccccgaccgcgttacgccagttaaatctgtctcccctgacacttctgcctaaagaaggtattgctatgctaaatgggacctcagtcatgactggcatcgcagctaactgcgtatacgacacccagatcctgactgcgattgcaatgggtgttcacgctctggatatccaggccctgaacggcaccaaccagtctttccacccgtttatccataactctaagccgcacccaggtcagctgtgggcggctgatcagatgatatcattgctggctaactcgcaactggtacgggacgagctggacggcaaacatgattaccgcgaccacgagctgatccaggatcgttatagcctgcgttgccttccgcagtacctgggtccgattgtggacggtatctcacagatagcaaaacaaatcgaaattgaaattaactccgttactgataaccctctgattgacgtcgataaccaggcgtcgtaccacggcggaaatttcctgggtcagtatgttggcatgggtatggaccaccttcgctactatatcggcctgctggcgaaacacctggatgtgcagattgcgctgctagctagtcccgaatttagcaacggactgccgccatctttattgggcaaccgtgaacgtaaggttaacatgggtctgaaaggtttacaaatctgtggcaattccatcatgccgctgctgacgttctacggcaatagcatcgccgaccgctttccgacccatgcagagcaattcaaccagaatatcaactctcagggctacacctccgcaacgctggcgcgacgtagtgttgatatcttccaaaactacgttgcgattgccctgatgtttggcgtccaggctgtagacctgaggacttataaaaagactggccattacgatgcgcgtgcttgcctctctccggctaccgaacgcctgtattccgccgtgcgtcacgtagttggtcagaaacctacttcagatcgcccatacatctggaacgataacgagcagggtctggatgaacacatcgctcgcatctccgctgacattgccgctggcggagtaattgttcaagctgtacaggatatcctgccgtgcctgcactaaccggcttatcggtcagtttcacctgatttacgtaaaaacccgcttcggcgggtttttgcttttggaggggcagaaagatgaatgactgtccacgacgctatacccaaaagaaa

SEQ ID NO: 225 - DNA, 5122 bp, synthetic construct
  source 1..5122: mol_type = other DNA
aggctaggtggaggctcagtgatgataagtctgcgatggtggatgcatgtgtcatggtcatagctgtttcctgtgtgaaattgttatccgctcagagggcacaatcctattccgcgctatccgacaatctccaagacattaggtggagttcagttcggcgagcggaaatggcttacgaacggggcggagatttcctggaagatgccaggaagatacttaacagggaagtgagagggccgcggcaaagccgtttttccataggctccgcccccctgacaagcatcacgaaatctgacgctcaaatcagtggtggcgaaacccgacaggactataaagataccaggcgtttccccctggcggctccctcgtgcgctctcctgttcctgcctttcggtttaccggtgtcattccgctgttatggccgcgtttgtctcattccacgcctgacactcagttccgggtaggcagttcgctccaagctggactgtatgcacgaaccccccgttcagtccgaccgctgcgccttatccggtaactatcgtcttgagtccaacccggaaagacatgcaaaagcaccactggcagcagccactggtaattgatttagaggagttagtcttgaagtcatgcgccggttaaggctaaactgaaaggacaagttttggtgactgcgctcctccaagccagttacctcggttcaaagagttggtagctcagagaaccttcgaaaaaccgccctgcaaggcggttttttcgttttcagagcaagagattacgcgcagaccaaaacgatctcaagaagatcatcttattaagtctgacgctctattcaacaaagccgccgtccatgggtagggggcttcaaatcgtcctcgtgataccaattcggagcctgcttttttgtacaaacttgttgataatggcaattcaaggatcttcacctagatccttttaaattaaaaatgaagttttaaatcaatctaaagtatatatgagtaaacttggtctgacagttaccaatgcttaatcagtgaggcacctatctcagcgatctgtctatttcgttcatccatagttgcctgactccccgtcgtgtagataactacgatacgggagggcttaccatctggccccagtgctgcaatgataccgcgagagccacgctcaccggctccagatttatcagcaataaaccagccagccggaagggccgagcgcagaagtggtcctgcaactttatccgcctccatccagtctattaattgttgccgggaagctagagtaagtagttcgccagttaatagtttgcgcaacgttgttgccattgctacaggcatcgtggtgtcacgctcgtcgtttggtatggcttcattcagctccggttcccaacgatcaaggcgagttacatgatcccccatgttgtgcaaaaaagcggttagctccttcggtcctccgatcgttgtcagaagtaagttggccgcagtgttatcactcatggttatggcagcactgcataattctcttactgtcatgccatccgtaagatgcttttctgtgactggtgagtactcaaccaagtcattctgagaatagtgtatgcggcgaccgagttgctcttgcccggcgtcaatacgggataataccgcgccacatagcagaactttaaaagtgctcatcattggaaaacgttcttcggggcgaaaactctcaaggatcttaccgctgttgagatccagttcgatgtaacccactcgtgcacccaactgatcttcagcatcttttactttcaccagcgtttctgggtgagcaaaaacaggaaggcaaaatgccgcaaaaaagggaataagggcgacacggaaatgttgaatactcatactcttcctttttcaatattattgaagcatttatcagggttattgtctcatgagcggatacatatttgaatgtatttagaaaaataaacaaataggggttccgcgcacatttccccgaaaagtgccagatacctgaaacaaaacccatcgtacggccaaggaagtctccaataactgtgatccaccacaagcgccagggttttcccagtcacgacgttgtaaaacgacggccagtcatgcataatccgcacgcatctggaataaggaagtgccattccgcctgacctttgcctatgaggaccaaaacgaaaaaacaccctttcgggtgtcttttctggaatttggtaccgagaggctccatgattcagtatgacttgcctttggtcgaaaaaaaaagcccgcactgtcaggtgcgggcttttttctgtgtttccttattaggacccactttcacatttaagttgtttttctaatccgcatatgatcaattcaaggccgaataagaaggctggctctgcaccttggtgatcaaataattcgatagcttgtcgtaataatggcggcatactatcagtagtaggtgtttccctttcttctttagcgacttgatgctcttgatcttccaatacgcaacctaaagtaaaatgccccacagcgctgagtgcatataatgcattctctagtgaaaaaccttgttggcataaaaaggctaattgattttcgagagtttcatactgtttttctgtaggccgtgtacctaaatgtacttttgctccatcgcgatgacttagtaaagcacatctaaaacttttagcgttattacgtaaaaaatcttgccagctttccccttctaaagggcaaaagtgagtatggtgcctatctaacatctcaatggctaaggcgtcgagcaaagcccgcttattttttacatgccaatacaatgtaggctgctctacacctagcttctgggcgagtttacgggttgttaaaccttcgattccgacctcattaagcagctctaatgcgctgttaatcactttacttttatctaatctggacatattcaccaccctgaattgactctcttccgggcgctatcatgccataccgcgaaaggttttgcgccattcgatggcgcgccgccattgcttgtgcaatgtacatcagagattttgagacacaaccaattattgaaggcctccctaacggggggcctttttttgtttctggtcccccgcttaacgatcgttggctgttttcagcaggacgcactgacctccctatcagtgatagagattgacatccctatcagtgatagagatactgagcacagctgtcaccggatgtgctttccggtctgatgagtccgtgaggacgaaacagcctctacaaataattttgtttaaatcacacgggtaaggaggtatttaaatgaaaacactgtcccaagcacagtcgaagacgagtagccagcagttttctttcaccggtaattctagcgctaacgtgattatcggcaaccagaaactaactatcaacgacgtcgcccgcgttgctcggaacgggaccttagtaagcctgactaacaacactgatatacttcaaggcattcaggcgtcctgtgattatatcaataacgcagttgagtctggtgaaccaatttacggtgtgacctcaggcttcggcggtatggcgaacgttgctatcagccgtgaacaggcctccgaactgcaagagaatttggtatggtatatgaaaactggtgctgggaacaaactccctttggcggacgtacgtgcagcaatgctgctgcgcgccaactcgcatatgcgtggcgcgtccggtatccgtctggagctgatcaaacgtatggaaatcttcttgaacgctggtgttactccgtacgtttatgaatttggatctatcggcgcttctggagatctggtcccgctgagctacattacgggttccctgattggccttgacccgagcttcaaggtggatttcaacggcaaagaaatggacgccccgaccgcgttacgccagttaaatctgtctcccctgacacttctgcctaaagaaagtattgctatgaataatgggacctcagtcatgactggcatcgcagctaactgcgtatacgacacccagatcctgactgcgattgcaatgggtgttcacgctctggatatccaggccctgaacggcaccaaccagtctttccacccgtttatccataactctaagccgcacccaggtcagctgtgggcggctgatcagatgatatcattgctggctaactcgcaactggtacgggacgagctggacggcaaacatgattaccgcgaccacgagctgatccaggatcgttatagcctgcgttgccttccgcagtacctgggtccgattgtggacggtatctcacagatagcaaaacaaatcgaaattgaaattaactccgttactgataaccctctgattgacgtcgataaccaggcgtcgtaccacggcggaaatttcctgggtcagtatgttggcatgggtatggaccaccttcgctactatatcggcctgctggcgaaacacctggatgtgcagattgcgctgctagctagtcccgaatttagcaacggactgccgccatctttattgggcaaccgtgaacgtaaggttaacatgggtctgaaaggtttacaaatctgtggcaattccatcatgccgctgctgacgttctacggcaatagcatcgccgaccgctttccgacccatgcagagcaattcaaccagaatatcaactctcagggctacacctccgcaacgctggcgcgacgtagtgttgatatcttccaaaactacgttgcgattgccctgatgtttggcgtccaggctgtagacctgaggacttataaaaagactggccattacgatgcgcgtgcttgcctctctccggctaccgaacgcctgtattccgccgtgcgtcacgtagttggtcagaaacctacttcagatcgcccatacatctggaacgataacgagcagggtctggatgaacacatcgctcgcatctccgctgacattgccgctggcggagtaattgttcaagctgtacaggatatcctgccgtgcctgcactaaccggcttatcggtcagtttcacctgatttacgtaaaaacccgcttcggcgggtttttgcttttggaggggcagaaagatgaatgactgtccacgacgctatacccaaaagaaa

SEQ ID NO: 226 - DNA, 5122 bp, synthetic construct
  source 1..5122: mol_type = other DNA
aggctaggtggaggctcagtgatgataagtctgcgatggtggatgcatgtgtcatggtcatagctgtttcctgtgtgaaattgttatccgctcagagggcacaatcctattccgcgctatccgacaatctccaagacattaggtggagttcagttcggcgagcggaaatggcttacgaacggggcggagatttcctggaagatgccaggaagatacttaacagggaagtgagagggccgcggcaaagccgtttttccataggctccgcccccctgacaagcatcacgaaatctgacgctcaaatcagtggtggcgaaacccgacaggactataaagataccaggcgtttccccctggcggctccctcgtgcgctctcctgttcctgcctttcggtttaccggtgtcattccgctgttatggccgcgtttgtctcattccacgcctgacactcagttccgggtaggcagttcgctccaagctggactgtatgcacgaaccccccgttcagtccgaccgctgcgccttatccggtaactatcgtcttgagtccaacccggaaagacatgcaaaagcaccactggcagcagccactggtaattgatttagaggagttagtcttgaagtcatgcgccggttaaggctaaactgaaaggacaagttttggtgactgcgctcctccaagccagttacctcggttcaaagagttggtagctcagagaaccttcgaaaaaccgccctgcaaggcggttttttcgttttcagagcaagagattacgcgcagaccaaaacgatctcaagaagatcatcttattaagtctgacgctctattcaacaaagccgccgtccatgggtagggggcttcaaatcgtcctcgtgataccaattcggagcctgcttttttgtacaaacttgttgataatggcaattcaaggatcttcacctagatccttttaaattaaaaatgaagttttaaatcaatctaaagtatatatgagtaaacttggtctgacagttaccaatgcttaatcagtgaggcacctatctcagcgatctgtctatttcgttcatccatagttgcctgactccccgtcgtgtagataactacgatacgggagggcttaccatctggccccagtgctgcaatgataccgcgagagccacgctcaccggctccagatttatcagcaataaaccagccagccggaagggccgagcgcagaagtggtcctgcaactttatccgcctccatccagtctattaattgttgccgggaagctagagtaagtagttcgccagttaatagtttgcgcaacgttgttgccattgctacaggcatcgtggtgtcacgctcgtcgtttggtatggcttcattcagctccggttcccaacgatcaaggcgagttacatgatcccccatgttgtgcaaaaaagcggttagctccttcggtcctccgatcgttgtcagaagtaagttggccgcagtgttatcactcatggttatggcagcactgcataattctcttactgtcatgccatccgtaagatgcttttctgtgactggtgagtactcaaccaagtcattctgagaatagtgtatgcggcgaccgagttgctcttgcccggcgtcaatacgggataataccgcgccacatagcagaactttaaaagtgctcatcattggaaaacgttcttcggggcgaaaactctcaaggatcttaccgctgttgagatccagttcgatgtaacccactcgtgcacccaactgatcttcagcatcttttactttcaccagcgtttctgggtgagcaaaaacaggaaggcaaaatgccgcaaaaaagggaataagggcgacacggaaatgttgaatactcatactcttcctttttcaatattattgaagcatttatcagggttattgtctcatgagcggatacatatttgaatgtatttagaaaaataaacaaataggggttccgcgcacatttccccgaaaagtgccagatacctgaaacaaaacccatcgtacggccaaggaagtctccaataactgtgatccaccacaagcgccagggttttcccagtcacgacgttgtaaaacgacggccagtcatgcataatccgcacgcatctggaataaggaagtgccattccgcctgacctttgcctatgaggaccaaaacgaaaaaacaccctttcgggtgtcttttctggaatttggtaccgagaggctccatgattcagtatgacttgcctttggtcgaaaaaaaaagcccgcactgtcaggtgcgggcttttttctgtgtttccttattaggacccactttcacatttaagttgtttttctaatccgcatatgatcaattcaaggccgaataagaaggctggctctgcaccttggtgatcaaataattcgatagcttgtcgtaataatggcggcatactatcagtagtaggtgtttccctttcttctttagcgacttgatgctcttgatcttccaatacgcaacctaaagtaaaatgccccacagcgctgagtgcatataatgcattctctagtgaaaaaccttgttggcataaaaaggctaattgattttcgagagtttcatactgtttttctgtaggccgtgtacctaaatgtacttttgctccatcgcgatgacttagtaaagcacatctaaaacttttagcgttattacgtaaaaaatcttgccagctttccccttctaaagggcaaaagtgagtatggtgcctatctaacatctcaatggctaaggcgtcgagcaaagcccgcttattttttacatgccaatacaatgtaggctgctctacacctagcttctgggcgagtttacgggttgttaaaccttcgattccgacctcattaagcagctctaatgcgctgttaatcactttacttttatctaatctggacatattcaccaccctgaattgactctcttccgggcgctatcatgccataccgcgaaaggttttgcgccattcgatggcgcgccgccattgcttgtgcaatgtacatcagagattttgagacacaaccaattattgaaggcctccctaacggggggcctttttttgtttctggtcccccgcttaacgatcgttggctgttttcagcaggacgcactgacctccctatcagtgatagagattgacatccctatcagtgatagagatactgagcacagctgtcaccggatgtgctttccggtctgatgagtccgtgaggacgaaacagcctctacaaataattttgtttaaatcacacgggtaaggaggtatttaaatgaaaacactgtcccaagcacagtcgaagacgagtagccagcagttttctttcaccggtaattctagcgctaacgtgattatcggcaaccagaaactaactatcaacgacgtcgcccgcgttgctcggaacgggaccttagtaagcctgactaacaacactgatatacttcaaggcattcaggcgtcctgtgattatatcaataacgcagttgagtctggtgaaccaatttacggtgtgacctcaggcttcggcggtatggcgaacgttgctatcagccgtgaacaggcctccgaactgcaaaccaatattgtatggtttcataaaactggtgctgggaacaaactccctttggcggacgtacgtgcagcaatgctgctgcgcgccaactcgcatatgcgtggcgcgtccggtatccgtctggagctgatcaaacgtatggaaatcttcttgaacgctggtgttactccgtacgtttatgaatttggatctatcggcgcttctggagatctggtcccgctgagctacattacgggttccctgattggccttgacccgagcttcaaggtggatttcaacggcaaagaaatggacgccccgaccgcgttacgccagttaaatctgtctcccctgacacttctgcctaaagaagccatagctatggtgaatgggacctcagtcatgactggcatcgcagctaactgcgtatacgacacccagatcctgactgcgattgcaatgggtgttcacgctctggatatccaggccctgaacggcaccaaccagtctttccacccgtttatccataactctaagccgcacccaggtcagctgtgggcggctgatcagatgatatcattgctggctaactcgcaactggtacgggacgagctggacggcaaacatgattaccgcgaccacgagctgatccaggatcgttatagcctgcgttgccttccgcagtacctgggtccgattgtggacggtatctcacagatagcaaaacaaatcgaaattgaaattaactccgttactgataaccctctgattgacgtcgataaccaggcgtcgtaccacggcggaaatttcctgggtcagtatgttggcatgggtatggaccaccttcgctactatatcggcctgctggcgaaacacctggatgtgcagattgcgctgctagctagtcccgaatttagcaacggactgccgccatctttattgggcaaccgtgaacgtaaggttaacatgggtctgaaaggtttacaaatctgtggcaattccatcatgccgctgctgacgttctacggcaatagcatcgccgaccgctttccgacccatgcagagcaattcaaccagaatatcaactctcagggctacacctccgcaacgctggcgcgacgtagtgttgatatcttccaaaactacgttgcgattgccctgatgtttggcgtccaggctgtagacctgaggacttataaaaagactggccattacgatgcgcgtgcttgcctctctccggctaccgaacgcctgtattccgccgtgcgtcacgtagttggtcagaaacctacttcagatcgcccatacatctggaacgataacgagcagggtctggatgaacacatcgctcgcatctccgctgacattgccgctggcggagtaattgttcaagctgtacaggatatcctgccgtgcctgcactaaccggcttatcggtcagtttcacctgatttacgtaaaaacccgcttcggcgggtttttgcttttggaggggcagaaagatgaatgactgtccacgacgctatacccaaaagaaa

SEQ ID NO: 227 - DNA, 5122 bp, synthetic construct
  source 1..5122: mol_type = other DNA
aggctaggtggaggctcagtgatgataagtctgcgatggtggatgcatgtgtcatggtcatagctgtttcctgtgtgaaattgttatccgctcagagggcacaatcctattccgcgctatccgacaatctccaagacattaggtggagttcagttcggcgagcggaaatggcttacgaacggggcggagatttcctggaagatgccaggaagatacttaacagggaagtgagagggccgcggcaaagccgtttttccataggctccgcccccctgacaagcatcacgaaatctgacgctcaaatcagtggtggcgaaacccgacaggactataaagataccaggcgtttccccctggcggctccctcgtgcgctctcctgttcctgcctttcggtttaccggtgtcattccgctgttatggccgcgtttgtctcattccacgcctgacactcagttccgggtaggcagttcgctccaagctggactgtatgcacgaaccccccgttcagtccgaccgctgcgccttatccggtaactatcgtcttgagtccaacccggaaagacatgcaaaagcaccactggcagcagccactggtaattgatttagaggagttagtcttgaagtcatgcgccggttaaggctaaactgaaaggacaagttttggtgactgcgctcctccaagccagttacctcggttcaaagagttggtagctcagagaaccttcgaaaaaccgccctgcaaggcggttttttcgttttcagagcaagagattacgcgcagaccaaaacgatctcaagaagatcatcttattaagtctgacgctctattcaacaaagccgccgtccatgggtagggggcttcaaatcgtcctcgtgataccaattcggagcctgcttttttgtacaaacttgttgataatggcaattcaaggatcttcacctagatccttttaaattaaaaatgaagttttaaatcaatctaaagtatatatgagtaaacttggtctgacagttaccaatgcttaatcagtgaggcacctatctcagcgatctgtctatttcgttcatccatagttgcctgactccccgtcgtgtagataactacgatacgggagggcttaccatctggccccagtgctgcaatgataccgcgagagccacgctcaccggctccagatttatcagcaataaaccagccagccggaagggccgagcgcagaagtggtcctgcaactttatccgcctccatccagtctattaattgttgccgggaagctagagtaagtagttcgccagttaatagtttgcgcaacgttgttgccattgctacaggcatcgtggtgtcacgctcgtcgtttggtatggcttcattcagctccggttcccaacgatcaaggcgagttacatgatcccccatgttgtgcaaaaaagcggttagctccttcggtcctccgatcgttgtcagaagtaagttggccgcagtgttatcactcatggttatggcagcactgcataattctcttactgtcatgccatccgtaagatgcttttctgtgactggtgagtactcaaccaagtcattctgagaatagtgtatgcggcgaccgagttgctcttgcccggcgtcaatacgggataataccgcgccacatagcagaactttaaaagtgctcatcattggaaaacgttcttcggggcgaaaactctcaaggatcttaccgctgttgagatccagttcgatgtaacccactcgtgcacccaactgatcttcagcatcttttactttcaccagcgtttctgggtgagcaaaaacaggaaggcaaaatgccgcaaaaaagggaataagggcgacacggaaatgttgaatactcatactcttcctttttcaatattattgaagcatttatcagggttattgtctcatgagcggatacatatttgaatgtatttagaaaaataaacaaataggggttccgcgcacatttccccgaaaagtgccagatacctgaaacaaaacccatcgtacggccaaggaagtctccaataactgtgatccaccacaagcgccagggttttcccagtcacgacgttgtaaaacgacggccagtcatgcataatccgcacgcatctggaataaggaagtgccattccgcctgacctttgcctatgaggaccaaaacgaaaaaacaccctttcgggtgtcttttctggaatttggtaccgagaggctccatgattcagtatgacttgcctttggtcgaaaaaaaaagcccgcactgtcaggtgcgggcttttttctgtgtttccttattaggacccactttcacatttaagttgtttttctaatccgcatatgatcaattcaaggccgaataagaaggctggctctgcaccttggtgatcaaataattcgatagcttgtcgtaataatggcggcatactatcagtagtaggtgtttccctttcttctttagcgacttgatgctcttgatcttccaatacgcaacctaaagtaaaatgccccacagcgctgagtgcatataatgcattctctagtgaaaaaccttgttggcataaaaaggctaattgattttcgagagtttcatactgtttttctgtaggccgtgtacctaaatgtacttttgctccatcgcgatgacttagtaaagcacatctaaaacttttagcgttattacgtaaaaaatcttgccagctttccccttctaaagggcaaaagtgagtatggtgcctatctaacatctcaatggctaaggcgtcgagcaaagcccgcttattttttacatgccaatacaatgtaggctgctctacacctagcttctgggcgagtttacgggttgttaaaccttcgattccgacctcattaagcagctctaatgcgctgttaatcactttacttttatctaatctggacatattcaccaccctgaattgactctcttccgggcgctatcatgccataccgcgaaaggttttgcgccattcgatggcgcgccgccattgcttgtgcaatgtacatcagagattttgagacacaaccaattattgaaggcctccctaacggggggcctttttttgtttctggtcccccgcttaacgatcgttggctgttttcagcaggacgcactgacctccctatcagtgatagagattgacatccctatcagtgatagagatactgagcacagctgtcaccggatgtgctttccggtctgatgagtccgtgaggacgaaacagcctctacaaataattttgtttaaatcacacgggtaaggaggtatttaaatgaaaacactgtcccaagcacagtcgaagacgagtagccagcagttttctttcaccggtaattctagcgctaacgtgattatcggcaaccagaaactaactatcaacgacgtcgcccgcgttgctcggaacgggaccttagtaagcctgactaacaacactgatatacttcaaggcattcaggcgtcctgtgattatatcaataacgcagttgagtctggtgaaccaatttacggtgtgacctcaggcttcggcggtatggcgaacgttgctatcagccgtgaacaggcctccgaactgcaagagaatatggtatggtatctgaaaactggtgctgggaacaaactccctttggcggacgtacgtgcagcaatgctgctgcgcgccaactcgcatatgcgtggcgcgtccggtatccgtctggagctgatcaaacgtatggaaatcttcttgaacgctggtgttactccgtacgtttatgaatttggatctatcggcgcttctggagatctggtcccgctgagctacattacgggttccctgattggccttgacccgagcttcaaggtggatttcaacggcaaagaaatggacgccccgaccgcgttacgccagttaaatctgtctcccctgacacttctgcctaaagaaggtctagctatgattaatgggacctcagtcatgactggcatcgcagctaactgcgtatacgacacccagatcctgactgcgattgcaatgggtgttcacgctctggatatccaggccctgaacggcaccaaccagtctttccacccgtttatccataactctaagccgcacccaggtcagctgtgggcggctgatcagatgatatcattgctggctaactcgcaactggtacgggacgagctggacggcaaacatgattaccgcgaccacgagctgatccaggatcgttatagcctgcgttgccttccgcagtacctgggtccgattgtggacggtatctcacagatagcaaaacaaatcgaaattgaaattaactccgttactgataaccctctgattgacgtcgataaccaggcgtcgtaccacggcggaaatttcctgggtcagtatgttggcatgggtatggaccaccttcgctactatatcggcctgctggcgaaacacctggatgtgcagattgcgctgctagctagtcccgaatttagcaacggactgccgccatctttattgggcaaccgtgaacgtaaggttaacatgggtctgaaaggtttacaaatctgtggcaattccatcatgccgctgctgacgttctacggcaatagcatcgccgaccgctttccgacccatgcagagcaattcaaccagaatatcaactctcagggctacacctccgcaacgctggcgcgacgtagtgttgatatcttccaaaactacgttgcgattgccctgatgtttggcgtccaggctgtagacctgaggacttataaaaagactggccattacgatgcgcgtgcttgcctctctccggctaccgaacgcctgtattccgccgtgcgtcacgtagttggtcagaaacctacttcagatcgcccatacatctggaacgataacgagcagggtctggatgaacacatcgctcgcatctccgctgacattgccgctggcggagtaattgttcaagctgtacaggatatcctgccgtgcctgcactaaccggcttatcggtcagtttcacctgatttacgtaaaaacccgcttcggcgggtttttgcttttggaggggcagaaagatgaatgactgtccacgacgctatacccaaaagaaa

SEQ ID NO: 228 - DNA, 5122 bp, synthetic construct
  source 1..5122: mol_type = other DNA
aggctaggtggaggctcagtgatgataagtctgcgatggtggatgcatgtgtcatggtcatagctgtttcctgtgtgaaattgttatccgctcagagggcacaatcctattccgcgctatccgacaatctccaagacattaggtggagttcagttcggcgagcggaaatggcttacgaacggggcggagatttcctggaagatgccaggaagatacttaacagggaagtgagagggccgcggcaaagccgtttttccataggctccgcccccctgacaagcatcacgaaatctgacgctcaaatcagtggtggcgaaacccgacaggactataaagataccaggcgtttccccctggcggctccctcgtgcgctctcctgttcctgcctttcggtttaccggtgtcattccgctgttatggccgcgtttgtctcattccacgcctgacactcagttccgggtaggcagttcgctccaagctggactgtatgcacgaaccccccgttcagtccgaccgctgcgccttatccggtaactatcgtcttgagtccaacccggaaagacatgcaaaagcaccactggcagcagccactggtaattgatttagaggagttagtcttgaagtcatgcgccggttaaggctaaactgaaaggacaagttttggtgactgcgctcctccaagccagttacctcggttcaaagagttggtagctcagagaaccttcgaaaaaccgccctgcaaggcggttttttcgttttcagagcaagagattacgcgcagaccaaaacgatctcaagaagatcatcttattaagtctgacgctctattcaacaaagccgccgtccatgggtagggggcttcaaatcgtcctcgtgataccaattcggagcctgcttttttgtacaaacttgttgataatggcaattcaaggatcttcacctagatccttttaaattaaaaatgaagttttaaatcaatctaaagtatatatgagtaaacttggtctgacagttaccaatgcttaatcagtgaggcacctatctcagcgatctgtctatttcgttcatccatagttgcctgactccccgtcgtgtagataactacgatacgggagggcttaccatctggccccagtgctgcaatgataccgcgagagccacgctcaccggctccagatttatcagcaataaaccagccagccggaagggccgagcgcagaagtggtcctgcaactttatccgcctccatccagtctattaattgttgccgggaagctagagtaagtagttcgccagttaatagtttgcgcaacgttgttgccattgctacaggcatcgtggtgtcacgctcgtcgtttggtatggcttcattcagctccggttcccaacgatcaaggcgagttacatgatcccccatgttgtgcaaaaaagcggttagctccttcggtcctccgatcgttgtcagaagtaagttggccgcagtgttatcactcatggttatggcagcactgcataattctcttactgtcatgccatccgtaagatgcttttctgtgactggtgagtactcaaccaagtcattctgagaatagtgtatgcggcgaccgagttgctcttgcccggcgtcaatacgggataataccgcgccacatagcagaactttaaaagtgctcatcattggaaaacgttcttcggggcgaaaactctcaaggatcttaccgctgttgagatccagttcgatgtaacccactcgtgcacccaactgatcttcagcatcttttactttcaccagcgtttctgggtgagcaaaaacaggaaggcaaaatgccgcaaaaaagggaataagggcgacacggaaatgttgaatactcatactcttcctttttcaatattattgaagcatttatcagggttattgtctcatgagcggatacatatttgaatgtatttagaaaaataaacaaataggggttccgcgcacatttccccgaaaagtgccagatacctgaaacaaaacccatcgtacggccaaggaagtctccaataactgtgatccaccacaagcgccagggttttcccagtcacgacgttgtaaaacgacggccagtcatgcataatccgcacgcatctggaataaggaagtgccattccgcctgacctttgcctatgaggaccaaaacgaaaaaacaccctttcgggtgtcttttctggaatttggtaccgagaggctccatgattcagtatgacttgcctttggtcgaaaaaaaaagcccgcactgtcaggtgcgggcttttttctgtgtttccttattaggacccactttcacatttaagttgtttttctaatccgcatatgatcaattcaaggccgaataagaaggctggctctgcaccttggtgatcaaataattcgatagcttgtcgtaataatggcggcatactatcagtagtaggtgtttccctttcttctttagcgacttgatgctcttgatcttccaatacgcaacctaaagtaaaatgccccacagcgctgagtgcatataatgcattctctagtgaaaaaccttgttggcataaaaaggctaattgattttcgagagtttcatactgtttttctgtaggccgtgtacctaaatgtacttttgctccatcgcgatgacttagtaaagcacatctaaaacttttagcgttattacgtaaaaaatcttgccagctttccccttctaaagggcaaaagtgagtatggtgcctatctaacatctcaatggctaaggcgtcgagcaaagcccgcttattttttacatgccaatacaatgtaggctgctctacacctagcttctgggcgagtttacgggttgttaaaccttcgattccgacctcattaagcagctctaatgcgctgttaatcactttacttttatctaatctggacatattcaccaccctgaattgactctcttccgggcgctatcatgccataccgcgaaaggttttgcgccattcgatggcgcgccgccattgcttgtgcaatgtacatcagagattttgagacacaaccaattattgaaggcctccctaacggggggcctttttttgtttctggtcccccgcttaacgatcgttggctgttttcagcaggacgcactgacctccctatcagtgatagagattgacatccctatcagtgatagagatactgagcacagctgtcaccggatgtgctttccggtctgatgagtccgtgaggacgaaacagcctctacaaataattttgtttaaatcacacgggtaaggaggtatttaaatgaaaacactgtcccaagcacagtcgaagacgagtagccagcagttttctttcaccggtaattctagcgctaacgtgattatcggcaaccagaaactaactatcaacgacgtcgcccgcgttgctcggaacgggaccttagtaagcctgactaacaacactgatatacttcaaggcattcaggcgtcctgtgattatatcaataacgcagttgagtctggtgaaccaatttacggtgtgacctcaggcttcggcggtatggcgaacgttgctatcagccgtgaacaggcctccgaactgcaagagaatgtggtatggtatatgaaaactggtgctgggaacaaactccctttggcggacgtacgtgcagcaatgctgctgcgcgccaactcgcatatgcgtggcgcgtccggtatccgtctggagctgatcaaacgtatggaaatcttcttgaacgctggtgttactccgtacgtttatgaatttggatctatcggcgcttctggagatctggtcccgctgagctacattacgggttccctgattggccttgacccgagcttcaaggtggatttcaacggcaaagaaatggacgccccgaccgcgttacgccagttaaatctgtctcccctgacacttctgcctaaagaaggtattgctatgaccaatgggacctcagtcatgactggcatcgcagctaactgcgtatacgacacccagatcctgactgcgattgcaatgggtgttcacgctctggatatccaggccctgaacggcaccaaccagtctttccacccgtttatccataactctaagccgcacccaggtcagctgtgggcggctgatcagatgatatcattgctggctaactcgcaactggtacgggacgagctggacggcaaacatgattaccgcgaccacgagctgatccaggatcgttatagcctgcgttgccttccgcagtacctgggtccgattgtggacggtatctcacagatagcaaaacaaatcgaaattgaaattaactccgttactgataaccctctgattgacgtcgataaccaggcgtcgtaccacggcggaaatttcctgggtcagtatgttggcatgggtatggaccaccttcgctactatatcggcctgctggcgaaacacctggatgtgcagattgcgctgctagctagtcccgaatttagcaacggactgccgccatctttattgggcaaccgtgaacgtaaggttaacatgggtctgaaaggtttacaaatctgtggcaattccatcatgccgctgctgacgttctacggcaatagcatcgccgaccgctttccgacccatgcagagcaattcaaccagaatatcaactctcagggctacacctccgcaacgctggcgcgacgtagtgttgatatcttccaaaactacgttgcgattgccctgatgtttggcgtccaggctgtagacctgaggacttataaaaagactggccattacgatgcgcgtgcttgcctctctccggctaccgaacgcctgtattccgccgtgcgtcacgtagttggtcagaaacctacttcagatcgcccatacatctggaacgataacgagcagggtctggatgaacacatcgctcgcatctccgctgacattgccgctggcggagtaattgttcaagctgtacaggatatcctgccgtgcctgcactaaccggcttatcggtcagtttcacctgatttacgtaaaaacccgcttcggcgggtttttgcttttggaggggcagaaagatgaatgactgtccacgacgctatacccaaaagaaa

SEQ ID NO: 229 - DNA, 5122 bp, synthetic construct
  source 1..5122: mol_type = other DNA
aggctaggtggaggctcagtgatgataagtctgcgatggtggatgcatgtgtcatggtcatagctgtttcctgtgtgaaattgttatccgctcagagggcacaatcctattccgcgctatccgacaatctccaagacattaggtggagttcagttcggcgagcggaaatggcttacgaacggggcggagatttcctggaagatgccaggaagatacttaacagggaagtgagagggccgcggcaaagccgtttttccataggctccgcccccctgacaagcatcacgaaatctgacgctcaaatcagtggtggcgaaacccgacaggactataaagataccaggcgtttccccctggcggctccctcgtgcgctctcctgttcctgcctttcggtttaccggtgtcattccgctgttatggccgcgtttgtctcattccacgcctgacactcagttccgggtaggcagttcgctccaagctggactgtatgcacgaaccccccgttcagtccgaccgctgcgccttatccggtaactatcgtcttgagtccaacccggaaagacatgcaaaagcaccactggcagcagccactggtaattgatttagaggagttagtcttgaagtcatgcgccggttaaggctaaactgaaaggacaagttttggtgactgcgctcctccaagccagttacctcggttcaaagagttggtagctcagagaaccttcgaaaaaccgccctgcaaggcggttttttcgttttcagagcaagagattacgcgcagaccaaaacgatctcaagaagatcatcttattaagtctgacgctctattcaacaaagccgccgtccatgggtagggggcttcaaatcgtcctcgtgataccaattcggagcctgcttttttgtacaaacttgttgataatggcaattcaaggatcttcacctagatccttttaaattaaaaatgaagttttaaatcaatctaaagtatatatgagtaaacttggtctgacagttaccaatgcttaatcagtgaggcacctatctcagcgatctgtctatttcgttcatccatagttgcctgactccccgtcgtgtagataactacgatacgggagggcttaccatctggccccagtgctgcaatgataccgcgagagccacgctcaccggctccagatttatcagcaataaaccagccagccggaagggccgagcgcagaagtggtcctgcaactttatccgcctccatccagtctattaattgttgccgggaagctagagtaagtagttcgccagttaatagtttgcgcaacgttgttgccattgctacaggcatcgtggtgtcacgctcgtcgtttggtatggcttcattcagctccggttcccaacgatcaaggcgagttacatgatcccccatgttgtgcaaaaaagcggttagctccttcggtcctccgatcgttgtcagaagtaagttggccgcagtgttatcactcatggttatggcagcactgcataattctcttactgtcatgccatccgtaagatgcttttctgtgactggtgagtactcaaccaagtcattctgagaatagtgtatgcggcgaccgagttgctcttgcccggcgtcaatacgggataataccgcgccacatagcagaactttaaaagtgctcatcattggaaaacgttcttcggggcgaaaactctcaaggatcttaccgctgttgagatccagttcgatgtaacccactcgtgcacccaactgatcttcagcatcttttactttcaccagcgtttctgggtgagcaaaaacaggaaggcaaaatgccgcaaaaaagggaataagggcgacacggaaatgttgaatactcatactcttcctttttcaatattattgaagcatttatcagggttattgtctcatgagcggatacatatttgaatgtatttagaaaaataaacaaataggggttccgcgcacatttccccgaaaagtgccagatacctgaaacaaaacccatcgtacggccaaggaagtctccaataactgtgatccaccacaagcgccagggttttcccagtcacgacgttgtaaaacgacggccagtcatgcataatccgcacgcatctggaataaggaagtgccattccgcctgacctttgcctatgaggaccaaaacgaaaaaacaccctttcgggtgtcttttctggaatttggtaccgagaggctccatgattcagtatgacttgcctttggtcgaaaaaaaaagcccgcactgtcaggtgcgggcttttttctgtgtttccttattaggacccactttcacatttaagttgtttttctaatccgcatatgatcaattcaaggccgaataagaaggctggctctgcaccttggtgatcaaataattcgatagcttgtcgtaataatggcggcatactatcagtagtaggtgtttccctttcttctttagcgacttgatgctcttgatcttccaatacgcaacctaaagtaaaatgccccacagcgctgagtgcatataatgcattctctagtgaaaaaccttgttggcataaaaaggctaattgattttcgagagtttcatactgtttttctgtaggccgtgtacctaaatgtacttttgctccatcgcgatgacttagtaaagcacatctaaaacttttagcgttattacgtaaaaaatcttgccagctttccccttctaaagggcaaaagtgagtatggtgcctatctaacatctcaatggctaaggcgtcgagcaaagcccgcttattttttacatgccaatacaatgtaggctgctctacacctagcttctgggcgagtttacgggttgttaaaccttcgattccgacctcattaagcagctctaatgcgctgttaatcactttacttttatctaatctggacatattcaccaccctgaattgactctcttccgggcgctatcatgccataccgcgaaaggttttgcgccattcgatggcgcgccgccattgcttgtgcaatgtacatcagagattttgagacacaaccaattattgaaggcctccctaacggggggcctttttttgtttctggtcccccgcttaacgatcgttggctgttttcagcaggacgcactgacctccctatcagtgatagagattgacatccctatcagtgatagagatactgagcacagctgtcaccggatgtgctttccggtctgatgagtccgtgaggacgaaacagcctctacaaataattttgtttaaatcacacgggtaaggaggtatttaaatgaaaacactgtcccaagcacagtcgaagacgagtagccagcagttttctttcaccggtaattctagcgctaacgtgattatcggcaaccagaaactaactatcaacgacgtcgcccgcgttgctcggaacgggaccttagtaagcctgactaacaacactgatatacttcaaggcattcaggcgtcctgtgattatatcaataacgcagttgagtctggtgaaccaatttacggtgtgacctcaggcttcggcggtatggcgaacgttgctatcagccgtgaacaggcctccgaactgcaatcgaatattgtatggtttctgaaaactggtgctgggaacaaactccctttggcggacgtacgtgcagcaatgctgctgcgcgccaactcgcatatgcgtggcgcgtccggtatccgtctggagctgatcaaacgtatggaaatcttcttgaacgctggtgttactccgtacgtttatgaatttggatctatcggcgcttctggagatctggtcccgctgagctacattacgggttccctgattggccttgacccgagcttcaaggtggatttcaacggcaaagaaatggacgccccgaccgcgttacgccagttaaatctgtctcccctgacacttctgcctaaagaatcaattgctatggtgaatgggacctcagtcatgactggcatcgcagctaactgcgtatacgacacccagatcctgactgcgattgcaatgggtgttcacgctctggatatccaggccctgaacggcaccaaccagtctttccacccgtttatccataactctaagccgcacccaggtcagctgtgggcggctgatcagatgatatcattgctggctaactcgcaactggtacgggacgagctggacggcaaacatgattaccgcgaccacgagctgatccaggatcgttatagcctgcgttgccttccgcagtacctgggtccgattgtggacggtatctcacagatagcaaaacaaatcgaaattgaaattaactccgttactgataaccctctgattgacgtcgataaccaggcgtcgtaccacggcggaaatttcctgggtcagtatgttggcatgggtatggaccaccttcgctactatatcggcctgctggcgaaacacctggatgtgcagattgcgctgctagctagtcccgaatttagcaacggactgccgccatctttattgggcaaccgtgaacgtaaggttaacatgggtctgaaaggtttacaaatctgtggcaattccatcatgccgctgctgacgttctacggcaatagcatcgccgaccgctttccgacccatgcagagcaattcaaccagaatatcaactctcagggctacacctccgcaacgctggcgcgacgtagtgttgatatcttccaaaactacgttgcgattgccctgatgtttggcgtccaggctgtagacctgaggacttataaaaagactggccattacgatgcgcgtgcttgcctctctccggctaccgaacgcctgtattccgccgtgcgtcacgtagttggtcagaaacctacttcagatcgcccatacatctggaacgataacgagcagggtctggatgaacacatcgctcgcatctccgctgacattgccgctggcggagtaattgttcaagctgtacaggatatcctgccgtgcctgcactaaccggcttatcggtcagtttcacctgatttacgtaaaaacccgcttcggcgggtttttgcttttggaggggcagaaagatgaatgactgtccacgacgctatacccaaaagaaa

SEQ ID NO: 230 - DNA, 5122 bp, synthetic construct
  source 1..5122: mol_type = other DNA
aggctaggtggaggctcagtgatgataagtctgcgatggtggatgcatgtgtcatggtcatagctgtttcctgtgtgaaattgttatccgctcagagggcacaatcctattccgcgctatccgacaatctccaagacattaggtggagttcagttcggcgagcggaaatggcttacgaacggggcggagatttcctggaagatgccaggaagatacttaacagggaagtgagagggccgcggcaaagccgtttttccataggctccgcccccctgacaagcatcacgaaatctgacgctcaaatcagtggtggcgaaacccgacaggactataaagataccaggcgtttccccctggcggctccctcgtgcgctctcctgttcctgcctttcggtttaccggtgtcattccgctgttatggccgcgtttgtctcattccacgcctgacactcagttccgggtaggcagttcgctccaagctggactgtatgcacgaaccccccgttcagtccgaccgctgcgccttatccggtaactatcgtcttgagtccaacccggaaagacatgcaaaagcaccactggcagcagccactggtaattgatttagaggagttagtcttgaagtcatgcgccggttaaggctaaactgaaaggacaagttttggtgactgcgctcctccaagccagttacctcggttcaaagagttggtagctcagagaaccttcgaaaaaccgccctgcaaggcggttttttcgttttcagagcaagagattacgcgcagaccaaaacgatctcaagaagatcatcttattaagtctgacgctctattcaacaaagccgccgtccatgggtagggggcttcaaatcgtcctcgtgataccaattcggagcctgcttttttgtacaaacttgttgataatggcaattcaaggatcttcacctagatccttttaaattaaaaatgaagttttaaatcaatctaaagtatatatgagtaaacttggtctgacagttaccaatgcttaatcagtgaggcacctatctcagcgatctgtctatttcgttcatccatagttgcctgactccccgtcgtgtagataactacgatacgggagggcttaccatctggccccagtgctgcaatgataccgcgagagccacgctcaccggctccagatttatcagcaataaaccagccagccggaagggccgagcgcagaagtggtcctgcaactttatccgcctccatccagtctattaattgttgccgggaagctagagtaagtagttcgccagttaatagtttgcgcaacgttgttgccattgctacaggcatcgtggtgtcacgctcgtcgtttggtatggcttcattcagctccggttcccaacgatcaaggcgagttacatgatcccccatgttgtgcaaaaaagcggttagctccttcggtcctccgatcgttgtcagaagtaagttggccgcagtgttatcactcatggttatggcagcactgcataattctcttactgtcatgccatccgtaagatgcttttctgtgactggtgagtactcaaccaagtcattctgagaatagtgtatgcggcgaccgagttgctcttgcccggcgtcaatacgggataataccgcgccacatagcagaactttaaaagtgctcatcattggaaaacgttcttcggggcgaaaactctcaaggatcttaccgctgttgagatccagttcgatgtaacccactcgtgcacccaactgatcttcagcatcttttactttcaccagcgtttctgggtgagcaaaaacaggaaggcaaaatgccgcaaaaaagggaataagggcgacacggaaatgttgaatactcatactcttcctttttcaatattattgaagcatttatcagggttattgtctcatgagcggatacatatttgaatgtatttagaaaaataaacaaataggggttccgcgcacatttccccgaaaagtgccagatacctgaaacaaaacccatcgtacggccaaggaagtctccaataactgtgatccaccacaagcgccagggttttcccagtcacgacgttgtaaaacgacggccagtcatgcataatccgcacgcatctggaataaggaagtgccattccgcctgacctttgcctatgaggaccaaaacgaaaaaacaccctttcgggtgtcttttctggaatttggtaccgagaggctccatgattcagtatgacttgcctttggtcgaaaaaaaaagcccgcactgtcaggtgcgggcttttttctgtgtttccttattaggacccactttcacatttaagttgtttttctaatccgcatatgatcaattcaaggccgaataagaaggctggctctgcaccttggtgatcaaataattcgatagcttgtcgtaataatggcggcatactatcagtagtaggtgtttccctttcttctttagcgacttgatgctcttgatcttccaatacgcaacctaaagtaaaatgccccacagcgctgagtgcatataatgcattctctagtgaaaaaccttgttggcataaaaaggctaattgattttcgagagtttcatactgtttttctgtaggccgtgtacctaaatgtacttttgctccatcgcgatgacttagtaaagcacatctaaaacttttagcgttattacgtaaaaaatcttgccagctttccccttctaaagggcaaaagtgagtatggtgcctatctaacatctcaatggctaaggcgtcgagcaaagcccgcttattttttacatgccaatacaatgtaggctgctctacacctagcttctgggcgagtttacgggttgttaaaccttcgattccgacctcattaagcagctctaatgcgctgttaatcactttacttttatctaatctggacatattcaccaccctgaattgactctcttccgggcgctatcatgccataccgcgaaaggttttgcgccattcgatggcgcgccgccattgcttgtgcaatgtacatcagagattttgagacacaaccaattattgaaggcctccctaacggggggcctttttttgtttctggtcccccgcttaacgatcgttggctgttttcagcaggacgcactgacctccctatcagtgatagagattgacatccctatcagtgatagagatactgagcacagctgtcaccggatgtgctttccggtctgatgagtccgtgaggacgaaacagcctctacaaataattttgtttaaatcacacgggtaaggaggtatttaaatgaaaacactgtcccaagcacagtcgaagacgagtagccagcagttttctttcaccggtaattctagcgctaacgtgattatcggcaaccagaaactaactatcaacgacgtcgcccgcgttgctcggaacgggaccttagtaagcctgactaacaacactgatatacttcaaggcattcaggcgtcctgtgattatatcaataacgcagttgagtctggtgaaccaatttacggtgtgacctcaggcttcggcggtatggcgaacgttgctatcagccgtgaacaggcctccgaactgcaaaccaatgtcgtatggtttctgaaaactggtgctgggaacaaactccctttggcggacgtacgtgcagcaatgctgctgcgcgccaactcgcatatgcgtggcgcgtccggtatccgtctggagctgatcaaacgtatggaaatcttcttgaacgctggtgttactccgtacgtttatgaatttggatctatcggcgcttctggagatctggtcccgctgagctacattacgggttccctgattggccttgacccgagcttcaaggtggatttcaacggcaaagaaatggacgccccgaccgcgttacgccagttaaatctgtctcccctgacacttctgcctaaagaagcgctagctatgctcaatgggacctcagtcatgactggcatcgcagctaactgcgtatacgacacccagatcctgactgcgattgcaatgggtgttcacgctctggatatccaggccctgaacggcaccaaccagtctttccacccgtttatccataactctaagccgcacccaggtcagctgtgggcggctgatcagatgatatcattgctggctaactcgcaactggtacgggacgagctggacggcaaacatgattaccgcgaccacgagctgatccaggatcgttatagcctgcgttgccttccgcagtacctgggtccgattgtggacggtatctcacagatagcaaaacaaatcgaaattgaaattaactccgttactgataaccctctgattgacgtcgataaccaggcgtcgtaccacggcggaaatttcctgggtcagtatgttggcatgggtatggaccaccttcgctactatatcggcctgctggcgaaacacctggatgtgcagattgcgctgctagctagtcccgaatttagcaacggactgccgccatctttattgggcaaccgtgaacgtaaggttaacatgggtctgaaaggtttacaaatctgtggcaattccatcatgccgctgctgacgttctacggcaatagcatcgccgaccgctttccgacccatgcagagcaattcaaccagaatatcaactctcagggctacacctccgcaacgctggcgcgacgtagtgttgatatcttccaaaactacgttgcgattgccctgatgtttggcgtccaggctgtagacctgaggacttataaaaagactggccattacgatgcgcgtgcttgcctctctccggctaccgaacgcctgtattccgccgtgcgtcacgtagttggtcagaaacctacttcagatcgcccatacatctggaacgataacgagcagggtctggatgaacacatcgctcgcatctccgctgacattgccgctggcggagtaattgttcaagctgtacaggatatcctgccgtgcctgcactaaccggcttatcggtcagtttcacctgatttacgtaaaaacccgcttcggcgggtttttgcttttggaggggcagaaagatgaatgactgtccacgacgctatacccaaaagaaa

SEQ ID NO: 231 - DNA, 5122 bp, synthetic construct
  source 1..5122: mol_type = other DNA
aggctaggtggaggctcagtgatgataagtctgcgatggtggatgcatgtgtcatggtcatagctgtttcctgtgtgaaattgttatccgctcagagggcacaatcctattccgcgctatccgacaatctccaagacattaggtggagttcagttcggcgagcggaaatggcttacgaacggggcggagatttcctggaagatgccaggaagatacttaacagggaagtgagagggccgcggcaaagccgtttttccataggctccgcccccctgacaagcatcacgaaatctgacgctcaaatcagtggtggcgaaacccgacaggactataaagataccaggcgtttccccctggcggctccctcgtgcgctctcctgttcctgcctttcggtttaccggtgtcattccgctgttatggccgcgtttgtctcattccacgcctgacactcagttccgggtaggcagttcgctccaagctggactgtatgcacgaaccccccgttcagtccgaccgctgcgccttatccggtaactatcgtcttgagtccaacccggaaagacatgcaaaagcaccactggcagcagccactggtaattgatttagaggagttagtcttgaagtcatgcgccggttaaggctaaactgaaaggacaagttttggtgactgcgctcctccaagccagttacctcggttcaaagagttggtagctcagagaaccttcgaaaaaccgccctgcaaggcggttttttcgttttcagagcaagagattacgcgcagaccaaaacgatctcaagaagatcatcttattaagtctgacgctctattcaacaaagccgccgtccatgggtagggggcttcaaatcgtcctcgtgataccaattcggagcctgcttttttgtacaaacttgttgataatggcaattcaaggatcttcacctagatccttttaaattaaaaatgaagttttaaatcaatctaaagtatatatgagtaaacttggtctgacagttaccaatgcttaatcagtgaggcacctatctcagcgatctgtctatttcgttcatccatagttgcctgactccccgtcgtgtagataactacgatacgggagggcttaccatctggccccagtgctgcaatgataccgcgagagccacgctcaccggctccagatttatcagcaataaaccagccagccggaagggccgagcgcagaagtggtcctgcaactttatccgcctccatccagtctattaattgttgccgggaagctagagtaagtagttcgccagttaatagtttgcgcaacgttgttgccattgctacaggcatcgtggtgtcacgctcgtcgtttggtatggcttcattcagctccggttcccaacgatcaaggcgagttacatgatcccccatgttgtgcaaaaaagcggttagctccttcggtcctccgatcgttgtcagaagtaagttggccgcagtgttatcactcatggttatggcagcactgcataattctcttactgtcatgccatccgtaagatgcttttctgtgactggtgagtactcaaccaagtcattctgagaatagtgtatgcggcgaccgagttgctcttgcccggcgtcaatacgggataataccgcgccacatagcagaactttaaaagtgctcatcattggaaaacgttcttcggggcgaaaactctcaaggatcttaccgctgttgagatccagttcgatgtaacccactcgtgcacccaactgatcttcagcatcttttactttcaccagcgtttctgggtgagcaaaaacaggaaggcaaaatgccgcaaaaaagggaataagggcgacacggaaatgttgaatactcatactcttcctttttcaatattattgaagcatttatcagggttattgtctcatgagcggatacatatttgaatgtatttagaaaaataaacaaataggggttccgcgcacatttccccgaaaagtgccagatacctgaaacaaaacccatcgtacggccaaggaagtctccaataactgtgatccaccacaagcgccagggttttcccagtcacgacgttgtaaaacgacggccagtcatgcataatccgcacgcatctggaataaggaagtgccattccgcctgacctttgcctatgaggaccaaaacgaaaaaacaccctttcgggtgtcttttctggaatttggtaccgagaggctccatgattcagtatgacttgcctttggtcgaaaaaaaaagcccgcactgtcaggtgcgggcttttttctgtgtttccttattaggacccactttcacatttaagttgtttttctaatccgcatatgatcaattcaaggccgaataagaaggctggctctgcaccttggtgatcaaataattcgatagcttgtcgtaataatggcggcatactatcagtagtaggtgtttccctttcttctttagcgacttgatgctcttgatcttccaatacgcaacctaaagtaaaatgccccacagcgctgagtgcatataatgcattctctagtgaaaaaccttgttggcataaaaaggctaattgattttcgagagtttcatactgtttttctgtaggccgtgtacctaaatgtacttttgctccatcgcgatgacttagtaaagcacatctaaaacttttagcgttattacgtaaaaaatcttgccagctttccccttctaaagggcaaaagtgagtatggtgcctatctaacatctcaatggctaaggcgtcgagcaaagcccgcttattttttacatgccaatacaatgtaggctgctctacacctagcttctgggcgagtttacgggttgttaaaccttcgattccgacctcattaagcagctctaatgcgctgttaatcactttacttttatctaatctggacatattcaccaccctgaattgactctcttccgggcgctatcatgccataccgcgaaaggttttgcgccattcgatggcgcgccgccattgcttgtgcaatgtacatcagagattttgagacacaaccaattattgaaggcctccctaacggggggcctttttttgtttctggtcccccgcttaacgatcgttggctgttttcagcaggacgcactgacctccctatcagtgatagagattgacatccctatcagtgatagagatactgagcacagctgtcaccggatgtgctttccggtctgatgagtccgtgaggacgaaacagcctctacaaataattttgtttaaatcacacgggtaaggaggtatttaaatgaaaacactgtcccaagcacagtcgaagacgagtagccagcagttttctttcaccggtaattctagcgctaacgtgattatcggcaaccagaaactaactatcaacgacgtcgcccgcgttgctcggaacgggaccttagtaagcctgactaacaacactgatatacttcaaggcattcaggcgtcctgtgattatatcaataacgcagttgagtctggtgaaccaatttacggtgtgacctcaggcttcggcggtatggcgaacgttgctatcagccgtgaacaggcctccgaactgcaaaagaatttggtatggtttcataaaactggtgctgggaacaaactccctttggcggacgtacgtgcagcaatgctgctgcgcgccaactcgcatatgcgtggcgcgtccggtatccgtctggagctgatcaaacgtatggaaatcttcttgaacgctggtgttactccgtacgtttatgaatttggatctatcggcgcttctggagatctggtcccgctgagctacattacgggttccctgattggccttgacccgagcttcaaggtggatttcaacggcaaagaaatggacgccccgaccgcgttacgccagttaaatctgtctcccctgacacttctgcctaaagaagcaattgctatgacgaatgggacctcagtcatgactggcatcgcagctaactgcgtatacgacacccagatcctgactgcgattgcaatgggtgttcacgctctggatatccaggccctgaacggcaccaaccagtctttccacccgtttatccataactctaagccgcacccaggtcagctgtgggcggctgatcagatgatatcattgctggctaactcgcaactggtacgggacgagctggacggcaaacatgattaccgcgaccacgagctgatccaggatcgttatagcctgcgttgccttccgcagtacctgggtccgattgtggacggtatctcacagatagcaaaacaaatcgaaattgaaattaactccgttactgataaccctctgattgacgtcgataaccaggcgtcgtaccacggcggaaatttcctgggtcagtatgttggcatgggtatggaccaccttcgctactatatcggcctgctggcgaaacacctggatgtgcagattgcgctgctagctagtcccgaatttagcaacggactgccgccatctttattgggcaaccgtgaacgtaaggttaacatgggtctgaaaggtttacaaatctgtggcaattccatcatgccgctgctgacgttctacggcaatagcatcgccgaccgctttccgacccatgcagagcaattcaaccagaatatcaactctcagggctacacctccgcaacgctggcgcgacgtagtgttgatatcttccaaaactacgttgcgattgccctgatgtttggcgtccaggctgtagacctgaggacttataaaaagactggccattacgatgcgcgtgcttgcctctctccggctaccgaacgcctgtattccgccgtgcgtcacgtagttggtcagaaacctacttcagatcgcccatacatctggaacgataacgagcagggtctggatgaacacatcgctcgcatctccgctgacattgccgctggcggagtaattgttcaagctgtacaggatatcctgccgtgcctgcactaaccggcttatcggtcagtttcacctgatttacgtaaaaacccgcttcggcgggtttttgcttttggaggggcagaaagatgaatgactgtccacgacgctatacccaaaagaaa

SEQ ID NO: 232 - DNA, 5122 bp, synthetic construct
  source 1..5122: mol_type = other DNA
aggctaggtggaggctcagtgatgataagtctgcgatggtggatgcatgtgtcatggtcatagctgtttcctgtgtgaaattgttatccgctcagagggcacaatcctattccgcgctatccgacaatctccaagacattaggtggagttcagttcggcgagcggaaatggcttacgaacggggcggagatttcctggaagatgccaggaagatacttaacagggaagtgagagggccgcggcaaagccgtttttccataggctccgcccccctgacaagcatcacgaaatctgacgctcaaatcagtggtggcgaaacccgacaggactataaagataccaggcgtttccccctggcggctccctcgtgcgctctcctgttcctgcctttcggtttaccggtgtcattccgctgttatggccgcgtttgtctcattccacgcctgacactcagttccgggtaggcagttcgctccaagctggactgtatgcacgaaccccccgttcagtccgaccgctgcgccttatccggtaactatcgtcttgagtccaacccggaaagacatgcaaaagcaccactggcagcagccactggtaattgatttagaggagttagtcttgaagtcatgcgccggttaaggctaaactgaaaggacaagttttggtgactgcgctcctccaagccagttacctcggttcaaagagttggtagctcagagaaccttcgaaaaaccgccctgcaaggcggttttttcgttttcagagcaagagattacgcgcagaccaaaacgatctcaagaagatcatcttattaagtctgacgctctattcaacaaagccgccgtccatgggtagggggcttcaaatcgtcctcgtgataccaattcggagcctgcttttttgtacaaacttgttgataatggcaattcaaggatcttcacctagatccttttaaattaaaaatgaagttttaaatcaatctaaagtatatatgagtaaacttggtctgacagttaccaatgcttaatcagtgaggcacctatctcagcgatctgtctatttcgttcatccatagttgcctgactccccgtcgtgtagataactacgatacgggagggcttaccatctggccccagtgctgcaatgataccgcgagagccacgctcaccggctccagatttatcagcaataaaccagccagccggaagggccgagcgcagaagtggtcctgcaactttatccgcctccatccagtctattaattgttgccgggaagctagagtaagtagttcgccagttaatagtttgcgcaacgttgttgccattgctacaggcatcgtggtgtcacgctcgtcgtttggtatggcttcattcagctccggttcccaacgatcaaggcgagttacatgatcccccatgttgtgcaaaaaagcggttagctccttcggtcctccgatcgttgtcagaagtaagttggccgcagtgttatcactcatggttatggcagcactgcataattctcttactgtcatgccatccgtaagatgcttttctgtgactggtgagtactcaaccaagtcattctgagaatagtgtatgcggcgaccgagttgctcttgcccggcgtcaatacgggataataccgcgccacatagcagaactttaaaagtgctcatcattggaaaacgttcttcggggcgaaaactctcaaggatcttaccgctgttgagatccagttcgatgtaacccactcgtgcacccaactgatcttcagcatcttttactttcaccagcgtttctgggtgagcaaaaacaggaaggcaaaatgccgcaaaaaagggaataagggcgacacggaaatgttgaatactcatactcttcctttttcaatattattgaagcatttatcagggttattgtctcatgagcggatacatatttgaatgtatttagaaaaataaacaaataggggttccgcgcacatttccccgaaaagtgccagatacctgaaacaaaacccatcgtacggccaaggaagtctccaataactgtgatccaccacaagcgccagggttttcccagtcacgacgttgtaaaacgacggccagtcatgcataatccgcacgcatctggaataaggaagtgccattccgcctgacctttgcctatgaggaccaaaacgaaaaaacaccctttcgggtgtcttttctggaatttggtaccgagaggctccatgattcagtatgacttgcctttggtcgaaaaaaaaagcccgcactgtcaggtgcgggcttttttctgtgtttccttattaggacccactttcacatttaagttgtttttctaatccgcatatgatcaattcaaggccgaataagaaggctggctctgcaccttggtgatcaaataattcgatagcttgtcgtaataatggcggcatactatcagtagtaggtgtttccctttcttctttagcgacttgatgctcttgatcttccaatacgcaacctaaagtaaaatgccccacagcgctgagtgcatataatgcattctctagtgaaaaaccttgttggcataaaaaggctaattgattttcgagagtttcatactgtttttctgtaggccgtgtacctaaatgtacttttgctccatcgcgatgacttagtaaagcacatctaaaacttttagcgttattacgtaaaaaatcttgccagctttccccttctaaagggcaaaagtgagtatggtgcctatctaacatctcaatggctaaggcgtcgagcaaagcccgcttattttttacatgccaatacaatgtaggctgctctacacctagcttctgggcgagtttacgggttgttaaaccttcgattccgacctcattaagcagctctaatgcgctgttaatcactttacttttatctaatctggacatattcaccaccctgaattgactctcttccgggcgctatcatgccataccgcgaaaggttttgcgccattcgatggcgcgccgccattgcttgtgcaatgtacatcagagattttgagacacaaccaattattgaaggcctccctaacggggggcctttttttgtttctggtcccccgcttaacgatcgttggctgttttcagcaggacgcactgacctccctatcagtgatagagattgacatccctatcagtgatagagatactgagcacagctgtcaccggatgtgctttccggtctgatgagtccgtgaggacgaaacagcctctacaaataattttgtttaaatcacacgggtaaggaggtatttaaatgaaaacactgtcccaagcacagtcgaagacgagtagccagcagttttctttcaccggtaattctagcgctaacgtgattatcggcaaccagaaactaactatcaacgacgtcgcccgcgttgctcggaacgggaccttagtaagcctgactaacaacactgatatacttcaaggcattcaggcgtcctgtgattatatcaataacgcagttgagtctggtgaaccaatttacggtgtgacctcaggcttcggcggtatggcgaacgttgctatcagccgtgaacaggcctccgaactgcaaaccaatattgtatggtttatgaaaactggtgctgggaacaaactccctttggcggacgtacgtgcagcaatgctgctgcgcgccaactcgcatatgcgtggcgcgtccggtatccgtctggagctgatcaaacgtatggaaatcttcttgaacgctggtgttactccgtacgtttatgaatttggatctatcggcgcttctggagatctggtcccgctgagctacattacgggttccctgattggccttgacccgagcttcaaggtggatttcaacggcaaagaaatggacgccccgaccgcgttacgccagttaaatctgtctcccctgacacttctgcctaaagaatcactagctatgatgaatgggacctcagtcatgactggcatcgcagctaactgcgtatacgacacccagatcctgactgcgattgcaatgggtgttcacgctctggatatccaggccctgaacggcaccaaccagtctttccacccgtttatccataactctaagccgcacccaggtcagctgtgggcggctgatcagatgatatcattgctggctaactcgcaactggtacgggacgagctggacggcaaacatgattaccgcgaccacgagctgatccaggatcgttatagcctgcgttgccttccgcagtacctgggtccgattgtggacggtatctcacagatagcaaaacaaatcgaaattgaaattaactccgttactgataaccctctgattgacgtcgataaccaggcgtcgtaccacggcggaaatttcctgggtcagtatgttggcatgggtatggaccaccttcgctactatatcggcctgctggcgaaacacctggatgtgcagattgcgctgctagctagtcccgaatttagcaacggactgccgccatctttattgggcaaccgtgaacgtaaggttaacatgggtctgaaaggtttacaaatctgtggcaattccatcatgccgctgctgacgttctacggcaatagcatcgccgaccgctttccgacccatgcagagcaattcaaccagaatatcaactctcagggctacacctccgcaacgctggcgcgacgtagtgttgatatcttccaaaactacgttgcgattgccctgatgtttggcgtccaggctgtagacctgaggacttataaaaagactggccattacgatgcgcgtgcttgcctctctccggctaccgaacgcctgtattccgccgtgcgtcacgtagttggtcagaaacctacttcagatcgcccatacatctggaacgataacgagcagggtctggatgaacacatcgctcgcatctccgctgacattgccgctggcggagtaattgttcaagctgtacaggatatcctgccgtgcctgcactaaccggcttatcggtcagtttcacctgatttacgtaaaaacccgcttcggcgggtttttgcttttggaggggcagaaagatgaatgactgtccacgacgctatacccaaaagaaa

SEQ ID NO: 233 - DNA, 5122 bp, synthetic construct
  source 1..5122: mol_type = other DNA
aggctaggtggaggctcagtgatgataagtctgcgatggtggatgcatgtgtcatggtcatagctgtttcctgtgtgaaattgttatccgctcagagggcacaatcctattccgcgctatccgacaatctccaagacattaggtggagttcagttcggcgagcggaaatggcttacgaacggggcggagatttcctggaagatgccaggaagatacttaacagggaagtgagagggccgcggcaaagccgtttttccataggctccgcccccctgacaagcatcacgaaatctgacgctcaaatcagtggtggcgaaacccgacaggactataaagataccaggcgtttccccctggcggctccctcgtgcgctctcctgttcctgcctttcggtttaccggtgtcattccgctgttatggccgcgtttgtctcattccacgcctgacactcagttccgggtaggcagttcgctccaagctggactgtatgcacgaaccccccgttcagtccgaccgctgcgccttatccggtaactatcgtcttgagtccaacccggaaagacatgcaaaagcaccactggcagcagccactggtaattgatttagaggagttagtcttgaagtcatgcgccggttaaggctaaactgaaaggacaagttttggtgactgcgctcctccaagccagttacctcggttcaaagagttggtagctcagagaaccttcgaaaaaccgccctgcaaggcggttttttcgttttcagagcaagagattacgcgcagaccaaaacgatctcaagaagatcatcttattaagtctgacgctctattcaacaaagccgccgtccatgggtagggggcttcaaatcgtcctcgtgataccaattcggagcctgcttttttgtacaaacttgttgataatggcaattcaaggatcttcacctagatccttttaaattaaaaatgaagttttaaatcaatctaaagtatatatgagtaaacttggtctgacagttaccaatgcttaatcagtgaggcacctatctcagcgatctgtctatttcgttcatccatagttgcctgactccccgtcgtgtagataactacgatacgggagggcttaccatctggccccagtgctgcaatgataccgcgagagccacgctcaccggctccagatttatcagcaataaaccagccagccggaagggccgagcgcagaagtggtcctgcaactttatccgcctccatccagtctattaattgttgccgggaagctagagtaagtagttcgccagttaatagtttgcgcaacgttgttgccattgctacaggcatcgtggtgtcacgctcgtcgtttggtatggcttcattcagctccggttcccaacgatcaaggcgagttacatgatcccccatgttgtgcaaaaaagcggttagctccttcggtcctccgatcgttgtcagaagtaagttggccgcagtgttatcactcatggttatggcagcactgcataattctcttactgtcatgccatccgtaagatgcttttctgtgactggtgagtactcaaccaagtcattctgagaatagtgtatgcggcgaccgagttgctcttgcccggcgtcaatacgggataataccgcgccacatagcagaactttaaaagtgctcatcattggaaaacgttcttcggggcgaaaactctcaaggatcttaccgctgttgagatccagttcgatgtaacccactcgtgcacccaactgatcttcagcatcttttactttcaccagcgtttctgggtgagcaaaaacaggaaggcaaaatgccgcaaaaaagggaataagggcgacacggaaatgttgaatactcatactcttcctttttcaatattattgaagcatttatcagggttattgtctcatgagcggatacatatttgaatgtatttagaaaaataaacaaataggggttccgcgcacatttccccgaaaagtgccagatacctgaaacaaaacccatcgtacggccaaggaagtctccaataactgtgatccaccacaagcgccagggttttcccagtcacgacgttgtaaaacgacggccagtcatgcataatccgcacgcatctggaataaggaagtgccattccgcctgacctttgcctatgaggaccaaaacgaaaaaacaccctttcgggtgtcttttctggaatttggtaccgagaggctccatgattcagtatgacttgcctttggtcgaaaaaaaaagcccgcactgtcaggtgcgggcttttttctgtgtttccttattaggacccactttcacatttaagttgtttttctaatccgcatatgatcaattcaaggccgaataagaaggctggctctgcaccttggtgatcaaataattcgatagcttgtcgtaataatggcggcatactatcagtagtaggtgtttccctttcttctttagcgacttgatgctcttgatcttccaatacgcaacctaaagtaaaatgccccacagcgctgagtgcatataatgcattctctagtgaaaaaccttgttggcataaaaaggctaattgattttcgagagtttcatactgtttttctgtaggccgtgtacctaaatgtacttttgctccatcgcgatgacttagtaaagcacatctaaaacttttagcgttattacgtaaaaaatcttgccagctttccccttctaaagggcaaaagtgagtatggtgcctatctaacatctcaatggctaaggcgtcgagcaaagcccgcttattttttacatgccaatacaatgtaggctgctctacacctagcttctgggcgagtttacgggttgttaaaccttcgattccgacctcattaagcagctctaatgcgctgttaatcactttacttttatctaatctggacatattcaccaccctgaattgactctcttccgggcgctatcatgccataccgcgaaaggttttgcgccattcgatggcgcgccgccattgcttgtgcaatgtacatcagagattttgagacacaaccaattattgaaggcctccctaacggggggcctttttttgtttctggtcccccgcttaacgatcgttggctgttttcagcaggacgcactgacctccctatcagtgatagagattgacatccctatcagtgatagagatactgagcacagctgtcaccggatgtgctttccggtctgatgagtccgtgaggacgaaacagcctctacaaataattttgtttaaatcacacgggtaaggaggtatttaaatgaaaacactgtcccaagcacagtcgaagacgagtagccagcagttttctttcaccggtaattctagcgctaacgtgattatcggcaaccagaaactaactatcaacgacgtcgcccgcgttgctcggaacgggaccttagtaagcctgactaacaacactgatatacttcaaggcattcaggcgtcctgtgattatatcaataacgcagttgagtctggtgaaccaatttacggtgtgacctcaggcttcggcggtatggcgaacgttgctatcagccgtgaacaggcctccgaactgcaacataatttggtatggtatatgaaaactggtgctgggaacaaactccctttggcggacgtacgtgcagcaatgctgctgcgcgccaactcgcatatgcgtggcgcgtccggtatccgtctggagctgatcaaacgtatggaaatcttcttgaacgctggtgttactccgtacgtttatgaatttggatctatcggcgcttctggagatctggtcccgctgagctacattacgggttccctgattggccttgacccgagcttcaaggtggatttcaacggcaaagaaatggacgccccgaccgcgttacgccagttaaatctgtctcccctgacacttctgcctaaagaaggtatagctatggtgaatgggacctcagtcatgactggcatcgcagctaactgcgtatacgacacccagatcctgactgcgattgcaatgggtgttcacgctctggatatccaggccctgaacggcaccaaccagtctttccacccgtttatccataactctaagccgcacccaggtcagctgtgggcggctgatcagatgatatcattgctggctaactcgcaactggtacgggacgagctggacggcaaacatgattaccgcgaccacgagctgatccaggatcgttatagcctgcgttgccttccgcagtacctgggtccgattgtggacggtatctcacagatagcaaaacaaatcgaaattgaaattaactccgttactgataaccctctgattgacgtcgataaccaggcgtcgtaccacggcggaaatttcctgggtcagtatgttggcatgggtatggaccaccttcgctactatatcggcctgctggcgaaacacctggatgtgcagattgcgctgctagctagtcccgaatttagcaacggactgccgccatctttattgggcaaccgtgaacgtaaggttaacatgggtctgaaaggtttacaaatctgtggcaattccatcatgccgctgctgacgttctacggcaatagcatcgccgaccgctttccgacccatgcagagcaattcaaccagaatatcaactctcagggctacacctccgcaacgctggcgcgacgtagtgttgatatcttccaaaactacgttgcgattgccctgatgtttggcgtccaggctgtagacctgaggacttataaaaagactggccattacgatgcgcgtgcttgcctctctccggctaccgaacgcctgtattccgccgtgcgtcacgtagttggtcagaaacctacttcagatcgcccatacatctggaacgataacgagcagggtctggatgaacacatcgctcgcatctccgctgacattgccgctggcggagtaattgttcaagctgtacaggatatcctgccgtgcctgcactaaccggcttatcggtcagtttcacctgatttacgtaaaaacccgcttcggcgggtttttgcttttggaggggcagaaagatgaatgactgtccacgacgctatacccaaaagaaa

SEQ ID NO: 234 - DNA, 5122 bp, synthetic construct
  source 1..5122: mol_type = other DNA
aggctaggtggaggctcagtgatgataagtctgcgatggtggatgcatgtgtcatggtcatagctgtttcctgtgtgaaattgttatccgctcagagggcacaatcctattccgcgctatccgacaatctccaagacattaggtggagttcagttcggcgagcggaaatggcttacgaacggggcggagatttcctggaagatgccaggaagatacttaacagggaagtgagagggccgcggcaaagccgtttttccataggctccgcccccctgacaagcatcacgaaatctgacgctcaaatcagtggtggcgaaacccgacaggactataaagataccaggcgtttccccctggcggctccctcgtgcgctctcctgttcctgcctttcggtttaccggtgtcattccgctgttatggccgcgtttgtctcattccacgcctgacactcagttccgggtaggcagttcgctccaagctggactgtatgcacgaaccccccgttcagtccgaccgctgcgccttatccggtaactatcgtcttgagtccaacccggaaagacatgcaaaagcaccactggcagcagccactggtaattgatttagaggagttagtcttgaagtcatgcgccggttaaggctaaactgaaaggacaagttttggtgactgcgctcctccaagccagttacctcggttcaaagagttggtagctcagagaaccttcgaaaaaccgccctgcaaggcggttttttcgttttcagagcaagagattacgcgcagaccaaaacgatctcaagaagatcatcttattaagtctgacgctctattcaacaaagccgccgtccatgggtagggggcttcaaatcgtcctcgtgataccaattcggagcctgcttttttgtacaaacttgttgataatggcaattcaaggatcttcacctagatccttttaaattaaaaatgaagttttaaatcaatctaaagtatatatgagtaaacttggtctgacagttaccaatgcttaatcagtgaggcacctatctcagcgatctgtctatttcgttcatccatagttgcctgactccccgtcgtgtagataactacgatacgggagggcttaccatctggccccagtgctgcaatgataccgcgagagccacgctcaccggctccagatttatcagcaataaaccagccagccggaagggccgagcgcagaagtggtcctgcaactttatccgcctccatccagtctattaattgttgccgggaagctagagtaagtagttcgccagttaatagtttgcgcaacgttgttgccattgctacaggcatcgtggtgtcacgctcgtcgtttggtatggcttcattcagctccggttcccaacgatcaaggcgagttacatgatcccccatgttgtgcaaaaaagcggttagctccttcggtcctccgatcgttgtcagaagtaagttggccgcagtgttatcactcatggttatggcagcactgcataattctcttactgtcatgccatccgtaagatgcttttctgtgactggtgagtactcaaccaagtcattctgagaatagtgtatgcggcgaccgagttgctcttgcccggcgtcaatacgggataataccgcgccacatagcagaactttaaaagtgctcatcattggaaaacgttcttcggggcgaaaactctcaaggatcttaccgctgttgagatccagttcgatgtaacccactcgtgcacccaactgatcttcagcatcttttactttcaccagcgtttctgggtgagcaaaaacaggaaggcaaaatgccgcaaaaaagggaataagggcgacacggaaatgttgaatactcatactcttcctttttcaatattattgaagcatttatcagggttattgtctcatgagcggatacatatttgaatgtatttagaaaaataaacaaataggggttccgcgcacatttccccgaaaagtgccagatacctgaaacaaaacccatcgtacggccaaggaagtctccaataactgtgatccaccacaagcgccagggttttcccagtcacgacgttgtaaaacgacggccagtcatgcataatccgcacgcatctggaataaggaagtgccattccgcctgacctttgcctatgaggaccaaaacgaaaaaacaccctttcgggtgtcttttctggaatttggtaccgagaggctccatgattcagtatgacttgcctttggtcgaaaaaaaaagcccgcactgtcaggtgcgggcttttttctgtgtttccttattaggacccactttcacatttaagttgtttttctaatccgcatatgatcaattcaaggccgaataagaaggctggctctgcaccttggtgatcaaataattcgatagcttgtcgtaataatggcggcatactatcagtagtaggtgtttccctttcttctttagcgacttgatgctcttgatcttccaatacgcaacctaaagtaaaatgccccacagcgctgagtgcatataatgcattctctagtgaaaaaccttgttggcataaaaaggctaattgattttcgagagtttcatactgtttttctgtaggccgtgtacctaaatgtacttttgctccatcgcgatgacttagtaaagcacatctaaaacttttagcgttattacgtaaaaaatcttgccagctttccccttctaaagggcaaaagtgagtatggtgcctatctaacatctcaatggctaaggcgtcgagcaaagcccgcttattttttacatgccaatacaatgtaggctgctctacacctagcttctgggcgagtttacgggttgttaaaccttcgattccgacctcattaagcagctctaatgcgctgttaatcactttacttttatctaatctggacatattcaccaccctgaattgactctcttccgggcgctatcatgccataccgcgaaaggttttgcgccattcgatggcgcgccgccattgcttgtgcaatgtacatcagagattttgagacacaaccaattattgaaggcctccctaacggggggcctttttttgtttctggtcccccgcttaacgatcgttggctgttttcagcaggacgcactgacctccctatcagtgatagagattgacatccctatcagtgatagagatactgagcacagctgtcaccggatgtgctttccggtctgatgagtccgtgaggacgaaacagcctctacaaataattttgtttaaatcacacgggtaaggaggtatttaaatgaaaacactgtcccaagcacagtcgaagacgagtagccagcagttttctttcaccggtaattctagcgctaacgtgattatcggcaaccagaaactaactatcaacgacgtcgcccgcgttgctcggaacgggaccttagtaagcctgactaacaacactgatatacttcaaggcattcaggcgtcctgtgattatatcaataacgcagttgagtctggtgaaccaatttacggtgtgacctcaggcttcggcggtatggcgaacgttgctatcagccgtgaacaggcctccgaactgcaaaccaatgtggtatggcaccaaaaaactggtgctgggaacaaactccctttggcggacgtacgtgcagcaatgctgctgcgcgccaactcgcatatgcgtggcgcgtccggtatccgtctggagctgatcaaacgtatggaaatcttcttgaacgctggtgttactccgtacgtttatgaatttggatctatcggcgcttctggagatctggtcccgctgagctacattacgggttccctgattggccttgacccgagcttcaaggtggatttcaacggcaaagaaatggacgccccgaccgcgttacgccagttaaatctgtctcccctgacacttctgcctaaagaaggtctagctatgctcaatgggacctcagtcatgactggcatcgcagctaactgcgtatacgacacccagatcctgactgcgattgcaatgggtgttcacgctctggatatccaggccctgaacggcaccaaccagtctttccacccgtttatccataactctaagccgcacccaggtcagctgtgggcggctgatcagatgatatcattgctggctaactcgcaactggtacgggacgagctggacggcaaacatgattaccgcgaccacgagctgatccaggatcgttatagcctgcgttgccttccgcagtacctgggtccgattgtggacggtatctcacagatagcaaaacaaatcgaaattgaaattaactccgttactgataaccctctgattgacgtcgataaccaggcgtcgtaccacggcggaaatttcctgggtcagtatgttggcatgggtatggaccaccttcgctactatatcggcctgctggcgaaacacctggatgtgcagattgcgctgctagctagtcccgaatttagcaacggactgccgccatctttattgggcaaccgtgaacgtaaggttaacatgggtctgaaaggtttacaaatctgtggcaattccatcatgccgctgctgacgttctacggcaatagcatcgccgaccgctttccgacccatgcagagcaattcaaccagaatatcaactctcagggctacacctccgcaacgctggcgcgacgtagtgttgatatcttccaaaactacgttgcgattgccctgatgtttggcgtccaggctgtagacctgaggacttataaaaagactggccattacgatgcgcgtgcttgcctctctccggctaccgaacgcctgtattccgccgtgcgtcacgtagttggtcagaaacctacttcagatcgcccatacatctggaacgataacgagcagggtctggatgaacacatcgctcgcatctccgctgacattgccgctggcggagtaattgttcaagctgtacaggatatcctgccgtgcctgcactaaccggcttatcggtcagtttcacctgatttacgtaaaaacccgcttcggcgggtttttgcttttggaggggcagaaagatgaatgactgtccacgacgctatacccaaaagaaa

SEQ ID NO: 235 - DNA, 5122 bp, synthetic construct
  source 1..5122: mol_type = other DNA
aggctaggtggaggctcagtgatgataagtctgcgatggtggatgcatgtgtcatggtcatagctgtttcctgtgtgaaattgttatccgctcagagggcacaatcctattccgcgctatccgacaatctccaagacattaggtggagttcagttcggcgagcggaaatggcttacgaacggggcggagatttcctggaagatgccaggaagatacttaacagggaagtgagagggccgcggcaaagccgtttttccataggctccgcccccctgacaagcatcacgaaatctgacgctcaaatcagtggtggcgaaacccgacaggactataaagataccaggcgtttccccctggcggctccctcgtgcgctctcctgttcctgcctttcggtttaccggtgtcattccgctgttatggccgcgtttgtctcattccacgcctgacactcagttccgggtaggcagttcgctccaagctggactgtatgcacgaaccccccgttcagtccgaccgctgcgccttatccggtaactatcgtcttgagtccaacccggaaagacatgcaaaagcaccactggcagcagccactggtaattgatttagaggagttagtcttgaagtcatgcgccggttaaggctaaactgaaaggacaagttttggtgactgcgctcctccaagccagttacctcggttcaaagagttggtagctcagagaaccttcgaaaaaccgccctgcaaggcggttttttcgttttcagagcaagagattacgcgcagaccaaaacgatctcaagaagatcatcttattaagtctgacgctctattcaacaaagccgccgtccatgggtagggggcttcaaatcgtcctcgtgataccaattcggagcctgcttttttgtacaaacttgttgataatggcaattcaaggatcttcacctagatccttttaaattaaaaatgaagttttaaatcaatctaaagtatatatgagtaaacttggtctgacagttaccaatgcttaatcagtgaggcacctatctcagcgatctgtctatttcgttcatccatagttgcctgactccccgtcgtgtagataactacgatacgggagggcttaccatctggccccagtgctgcaatgataccgcgagagccacgctcaccggctccagatttatcagcaataaaccagccagccggaagggccgagcgcagaagtggtcctgcaactttatccgcctccatccagtctattaattgttgccgggaagctagagtaagtagttcgccagttaatagtttgcgcaacgttgttgccattgctacaggcatcgtggtgtcacgctcgtcgtttggtatggcttcattcagctccggttcccaacgatcaaggcgagttacatgatcccccatgttgtgcaaaaaagcggttagctccttcggtcctccgatcgttgtcagaagtaagttggccgcagtgttatcactcatggttatggcagcactgcataattctcttactgtcatgccatccgtaagatgcttttctgtgactggtgagtactcaaccaagtcattctgagaatagtgtatgcggcgaccgagttgctcttgcccggcgtcaatacgggataataccgcgccacatagcagaactttaaaagtgctcatcattggaaaacgttcttcggggcgaaaactctcaaggatcttaccgctgttgagatccagttcgatgtaacccactcgtgcacccaactgatcttcagcatcttttactttcaccagcgtttctgggtgagcaaaaacaggaaggcaaaatgccgcaaaaaagggaataagggcgacacggaaatgttgaatactcatactcttcctttttcaatattattgaagcatttatcagggttattgtctcatgagcggatacatatttgaatgtatttagaaaaataaacaaataggggttccgcgcacatttccccgaaaagtgccagatacctgaaacaaaacccatcgtacggccaaggaagtctccaataactgtgatccaccacaagcgccagggttttcccagtcacgacgttgtaaaacgacggccagtcatgcataatccgcacgcatctggaataaggaagtgccattccgcctgacctttgcctatgaggaccaaaacgaaaaaacaccctttcgggtgtcttttctggaatttggtaccgagaggctccatgattcagtatgacttgcctttggtcgaaaaaaaaagcccgcactgtcaggtgcgggcttttttctgtgtttccttattaggacccactttcacatttaagttgtttttctaatccgcatatgatcaattcaaggccgaataagaaggctggctctgcaccttggtgatcaaataattcgatagcttgtcgtaataatggcggcatactatcagtagtaggtgtttccctttcttctttagcgacttgatgctcttgatcttccaatacgcaacctaaagtaaaatgccccacagcgctgagtgcatataatgcattctctagtgaaaaaccttgttggcataaaaaggctaattgattttcgagagtttcatactgtttttctgtaggccgtgtacctaaatgtacttttgctccatcgcgatgacttagtaaagcacatctaaaacttttagcgttattacgtaaaaaatcttgccagctttccccttctaaagggcaaaagtgagtatggtgcctatctaacatctcaatggctaaggcgtcgagcaaagcccgcttattttttacatgccaatacaatgtaggctgctctacacctagcttctgggcgagtttacgggttgttaaaccttcgattccgacctcattaagcagctctaatgcgctgttaatcactttacttttatctaatctggacatattcaccaccctgaattgactctcttccgggcgctatcatgccataccgcgaaaggttttgcgccattcgatggcgcgccgccattgcttgtgcaatgtacatcagagattttgagacacaaccaattattgaaggcctccctaacggggggcctttttttgtttctggtcccccgcttaacgatcgttggctgttttcagcaggacgcactgacctccctatcagtgatagagattgacatccctatcagtgatagagatactgagcacagctgtcaccggatgtgctttccggtctgatgagtccgtgaggacgaaacagcctctacaaataattttgtttaaatcacacgggtaaggaggtatttaaatgaaaacactgtcccaagcacagtcgaagacgagtagccagcagttttctttcaccggtaattctagcgctaacgtgattatcggcaaccagaaactaactatcaacgacgtcgcccgcgttgctcggaacgggaccttagtaagcctgactaacaacactgatatacttcaaggcattcaggcgtcctgtgattatatcaataacgcagttgagtctggtgaaccaatttacggtgtgacctcaggcttcggcggtatggcgaacgttgctatcagccgtgaacaggcctccgaactgcaaaagaatgcggtatggtttcagaaaactggtgctgggaacaaactccctttggcggacgtacgtgcagcaatgctgctgcgcgccaactcgcatatgcgtggcgcgtccggtatccgtctggagctgatcaaacgtatggaaatcttcttgaacgctggtgttactccgtacgtttatgaatttggatctatcggcgcttctggagatctggtcccgctgagctacattacgggttccctgattggccttgacccgagcttcaaggtggatttcaacggcaaagaaatggacgccccgaccgcgttacgccagttaaatctgtctcccctgacacttctgcctaaagaagccattgctatgatgaatgggacctcagtcatgactggcatcgcagctaactgcgtatacgacacccagatcctgactgcgattgcaatgggtgttcacgctctggatatccaggccctgaacggcaccaaccagtctttccacccgtttatccataactctaagccgcacccaggtcagctgtgggcggctgatcagatgatatcattgctggctaactcgcaactggtacgggacgagctggacggcaaacatgattaccgcgaccacgagctgatccaggatcgttatagcctgcgttgccttccgcagtacctgggtccgattgtggacggtatctcacagatagcaaaacaaatcgaaattgaaattaactccgttactgataaccctctgattgacgtcgataaccaggcgtcgtaccacggcggaaatttcctgggtcagtatgttggcatgggtatggaccaccttcgctactatatcggcctgctggcgaaacacctggatgtgcagattgcgctgctagctagtcccgaatttagcaacggactgccgccatctttattgggcaaccgtgaacgtaaggttaacatgggtctgaaaggtttacaaatctgtggcaattccatcatgccgctgctgacgttctacggcaatagcatcgccgaccgctttccgacccatgcagagcaattcaaccagaatatcaactctcagggctacacctccgcaacgctggcgcgacgtagtgttgatatcttccaaaactacgttgcgattgccctgatgtttggcgtccaggctgtagacctgaggacttataaaaagactggccattacgatgcgcgtgcttgcctctctccggctaccgaacgcctgtattccgccgtgcgtcacgtagttggtcagaaacctacttcagatcgcccatacatctggaacgataacgagcagggtctggatgaacacatcgctcgcatctccgctgacattgccgctggcggagtaattgttcaagctgtacaggatatcctgccgtgcctgcactaaccggcttatcggtcagtttcacctgatttacgtaaaaacccgcttcggcgggtttttgcttttggaggggcagaaagatgaatgactgtccacgacgctatacccaaaagaaa

SEQ ID NO: 236 - DNA, 5122 bp, synthetic construct
  source 1..5122: mol_type = other DNA
aggctaggtggaggctcagtgatgataagtctgcgatggtggatgcatgtgtcatggtcatagctgtttcctgtgtgaaattgttatccgctcagagggcacaatcctattccgcgctatccgacaatctccaagacattaggtggagttcagttcggcgagcggaaatggcttacgaacggggcggagatttcctggaagatgccaggaagatacttaacagggaagtgagagggccgcggcaaagccgtttttccataggctccgcccccctgacaagcatcacgaaatctgacgctcaaatcagtggtggcgaaacccgacaggactataaagataccaggcgtttccccctggcggctccctcgtgcgctctcctgttcctgcctttcggtttaccggtgtcattccgctgttatggccgcgtttgtctcattccacgcctgacactcagttccgggtaggcagttcgctccaagctggactgtatgcacgaaccccccgttcagtccgaccgctgcgccttatccggtaactatcgtcttgagtccaacccggaaagacatgcaaaagcaccactggcagcagccactggtaattgatttagaggagttagtcttgaagtcatgcgccggttaaggctaaactgaaaggacaagttttggtgactgcgctcctccaagccagttacctcggttcaaagagttggtagctcagagaaccttcgaaaaaccgccctgcaaggcggttttttcgttttcagagcaagagattacgcgcagaccaaaacgatctcaagaagatcatcttattaagtctgacgctctattcaacaaagccgccgtccatgggtagggggcttcaaatcgtcctcgtgataccaattcggagcctgcttttttgtacaaacttgttgataatggcaattcaaggatcttcacctagatccttttaaattaaaaatgaagttttaaatcaatctaaagtatatatgagtaaacttggtctgacagttaccaatgcttaatcagtgaggcacctatctcagcgatctgtctatttcgttcatccatagttgcctgactccccgtcgtgtagataactacgatacgggagggcttaccatctggccccagtgctgcaatgataccgcgagagccacgctcaccggctccagatttatcagcaataaaccagccagccggaagggccgagcgcagaagtggtcctgcaactttatccgcctccatccagtctattaattgttgccgggaagctagagtaagtagttcgccagttaatagtttgcgcaacgttgttgccattgctacaggcatcgtggtgtcacgctcgtcgtttggtatggcttcattcagctccggttcccaacgatcaaggcgagttacatgatcccccatgttgtgcaaaaaagcggttagctccttcggtcctccgatcgttgtcagaagtaagttggccgcagtgttatcactcatggttatggcagcactgcataattctcttactgtcatgccatccgtaagatgcttttctgtgactggtgagtactcaaccaagtcattctgagaatagtgtatgcggcgaccgagttgctcttgcccggcgtcaatacgggataataccgcgccacatagcagaactttaaaagtgctcatcattggaaaacgttcttcggggcgaaaactctcaaggatcttaccgctgttgagatccagttcgatgtaacccactcgtgcacccaactgatcttcagcatcttttactttcaccagcgtttctgggtgagcaaaaacaggaaggcaaaatgccgcaaaaaagggaataagggcgacacggaaatgttgaatactcatactcttcctttttcaatattattgaagcatttatcagggttattgtctcatgagcggatacatatttgaatgtatttagaaaaataaacaaataggggttccgcgcacatttccccgaaaagtgccagatacctgaaacaaaacccatcgtacggccaaggaagtctccaataactgtgatccaccacaagcgccagggttttcccagtcacgacgttgtaaaacgacggccagtcatgcataatccgcacgcatctggaataaggaagtgccattccgcctgacctttgcctatgaggaccaaaacgaaaaaacaccctttcgggtgtcttttctggaatttggtaccgagaggctccatgattcagtatgacttgcctttggtcgaaaaaaaaagcccgcactgtcaggtgcgggcttttttctgtgtttccttattaggacccactttcacatttaagttgtttttctaatccgcatatgatcaattcaaggccgaataagaaggctggctctgcaccttggtgatcaaataattcgatagcttgtcgtaataatggcggcatactatcagtagtaggtgtttccctttcttctttagcgacttgatgctcttgatcttccaatacgcaacctaaagtaaaatgccccacagcgctgagtgcatataatgcattctctagtgaaaaaccttgttggcataaaaaggctaattgattttcgagagtttcatactgtttttctgtaggccgtgtacctaaatgtacttttgctccatcgcgatgacttagtaaagcacatctaaaacttttagcgttattacgtaaaaaatcttgccagctttccccttctaaagggcaaaagtgagtatggtgcctatctaacatctcaatggctaaggcgtcgagcaaagcccgcttattttttacatgccaatacaatgtaggctgctctacacctagcttctgggcgagtttacgggttgttaaaccttcgattccgacctcattaagcagctctaatgcgctgttaatcactttacttttatctaatctggacatattcaccaccctgaattgactctcttccgggcgctatcatgccataccgcgaaaggttttgcgccattcgatggcgcgccgccattgcttgtgcaatgtacatcagagattttgagacacaaccaattattgaaggcctccctaacggggggcctttttttgtttctggtcccccgcttaacgatcgttggctgttttcagcaggacgcactgacctccctatcagtgatagagattgacatccctatcagtgatagagatactgagcacagctgtcaccggatgtgctttccggtctgatgagtccgtgaggacgaaacagcctctacaaataattttgtttaaatcacacgggtaaggaggtatttaaatgaaaacactgtcccaagcacagtcgaagacgagtagccagcagttttctttcaccggtaattctagcgctaacgtgattatcggcaaccagaaactaactatcaacgacgtcgcccgcgttgctcggaacgggaccttagtaagcctgactaacaacactgatatacttcaaggcattcaggcgtcctgtgattatatcaataacgcagttgagtctggtgaaccaatttacggtgtgacctcaggcttcggcggtatggcgaacgttgctatcagccgtgaacaggcctccgaactgcaatcaaatgcggtatggagtctgaaaactggtgctgggaacaaactccctttggcggacgtacgtgcagcaatgctgctgcgcgccaactcgcatatgcgtggcgcgtccggtatccgtctggagctgatcaaacgtatggaaatcttcttgaacgctggtgttactccgtacgtttatgaatttggatctatcggcgcttctggagatctggtcccgctgagctacattacgggttccctgattggccttgacccgagcttcaaggtggatttcaacggcaaagaaatggacgccccgaccgcgttacgccagttaaatctgtctcccctgacacttctgcctaaagaaggtattgctatgaataatgggacctcagtcatgactggcatcgcagctaactgcgtatacgacacccagatcctgactgcgattgcaatgggtgttcacgctctggatatccaggccctgaacggcaccaaccagtctttccacccgtttatccataactctaagccgcacccaggtcagctgtgggcggctgatcagatgatatcattgctggctaactcgcaactggtacgggacgagctggacggcaaacatgattaccgcgaccacgagctgatccaggatcgttatagcctgcgttgccttccgcagtacctgggtccgattgtggacggtatctcacagatagcaaaacaaatcgaaattgaaattaactccgttactgataaccctctgattgacgtcgataaccaggcgtcgtaccacggcggaaatttcctgggtcagtatgttggcatgggtatggaccaccttcgctactatatcggcctgctggcgaaacacctggatgtgcagattgcgctgctagctagtcccgaatttagcaacggactgccgccatctttattgggcaaccgtgaacgtaaggttaacatgggtctgaaaggtttacaaatctgtggcaattccatcatgccgctgctgacgttctacggcaatagcatcgccgaccgctttccgacccatgcagagcaattcaaccagaatatcaactctcagggctacacctccgcaacgctggcgcgacgtagtgttgatatcttccaaaactacgttgcgattgccctgatgtttggcgtccaggctgtagacctgaggacttataaaaagactggccattacgatgcgcgtgcttgcctctctccggctaccgaacgcctgtattccgccgtgcgtcacgtagttggtcagaaacctacttcagatcgcccatacatctggaacgataacgagcagggtctggatgaacacatcgctcgcatctccgctgacattgccgctggcggagtaattgttcaagctgtacaggatatcctgccgtgcctgcactaaccggcttatcggtcagtttcacctgatttacgtaaaaacccgcttcggcgggtttttgcttttggaggggcagaaagatgaatgactgtccacgacgctatacccaaaagaaa

SEQ ID NO: 237 - DNA, 5122 bp, synthetic construct
  source 1..5122: mol_type = other DNA
aggctaggtggaggctcagtgatgataagtctgcgatggtggatgcatgtgtcatggtcatagctgtttcctgtgtgaaattgttatccgctcagagggcacaatcctattccgcgctatccgacaatctccaagacattaggtggagttcagttcggcgagcggaaatggcttacgaacggggcggagatttcctggaagatgccaggaagatacttaacagggaagtgagagggccgcggcaaagccgtttttccataggctccgcccccctgacaagcatcacgaaatctgacgctcaaatcagtggtggcgaaacccgacaggactataaagataccaggcgtttccccctggcggctccctcgtgcgctctcctgttcctgcctttcggtttaccggtgtcattccgctgttatggccgcgtttgtctcattccacgcctgacactcagttccgggtaggcagttcgctccaagctggactgtatgcacgaaccccccgttcagtccgaccgctgcgccttatccggtaactatcgtcttgagtccaacccggaaagacatgcaaaagcaccactggcagcagccactggtaattgatttagaggagttagtcttgaagtcatgcgccggttaaggctaaactgaaaggacaagttttggtgactgcgctcctccaagccagttacctcggttcaaagagttggtagctcagagaaccttcgaaaaaccgccctgcaaggcggttttttcgttttcagagcaagagattacgcgcagaccaaaacgatctcaagaagatcatcttattaagtctgacgctctattcaacaaagccgccgtccatgggtagggggcttcaaatcgtcctcgtgataccaattcggagcctgcttttttgtacaaacttgttgataatggcaattcaaggatcttcacctagatccttttaaattaaaaatgaagttttaaatcaatctaaagtatatatgagtaaacttggtctgacagttaccaatgcttaatcagtgaggcacctatctcagcgatctgtctatttcgttcatccatagttgcctgactccccgtcgtgtagataactacgatacgggagggcttaccatctggccccagtgctgcaatgataccgcgagagccacgctcaccggctccagatttatcagcaataaaccagccagccggaagggccgagcgcagaagtggtcctgcaactttatccgcctccatccagtctattaattgttgccgggaagctagagtaagtagttcgccagttaatagtttgcgcaacgttgttgccattgctacaggcatcgtggtgtcacgctcgtcgtttggtatggcttcattcagctccggttcccaacgatcaaggcgagttacatgatcccccatgttgtgcaaaaaagcggttagctccttcggtcctccgatcgttgtcagaagtaagttggccgcagtgttatcactcatggttatggcagcactgcataattctcttactgtcatgccatccgtaagatgcttttctgtgactggtgagtactcaaccaagtcattctgagaatagtgtatgcggcgaccgagttgctcttgcccggcgtcaatacgggataataccgcgccacatagcagaactttaaaagtgctcatcattggaaaacgttcttcggggcgaaaactctcaaggatcttaccgctgttgagatccagttcgatgtaacccactcgtgcacccaactgatcttcagcatcttttactttcaccagcgtttctgggtgagcaaaaacaggaaggcaaaatgccgcaaaaaagggaataagggcgacacggaaatgttgaatactcatactcttcctttttcaatattattgaagcatttatcagggttattgtctcatgagcggatacatatttgaatgtatttagaaaaataaacaaataggggttccgcgcacatttccccgaaaagtgccagatacctgaaacaaaacccatcgtacggccaaggaagtctccaataactgtgatccaccacaagcgccagggttttcccagtcacgacgttgtaaaacgacggccagtcatgcataatccgcacgcatctggaataaggaagtgccattccgcctgacctttgcctatgaggaccaaaacgaaaaaacaccctttcgggtgtcttttctggaatttggtaccgagaggctccatgattcagtatgacttgcctttggtcgaaaaaaaaagcccgcactgtcaggtgcgggcttttttctgtgtttccttattaggacccactttcacatttaagttgtttttctaatccgcatatgatcaattcaaggccgaataagaaggctggctctgcaccttggtgatcaaataattcgatagcttgtcgtaataatggcggcatactatcagtagtaggtgtttccctttcttctttagcgacttgatgctcttgatcttccaatacgcaacctaaagtaaaatgccccacagcgctgagtgcatataatgcattctctagtgaaaaaccttgttggcataaaaaggctaattgattttcgagagtttcatactgtttttctgtaggccgtgtacctaaatgtacttttgctccatcgcgatgacttagtaaagcacatctaaaacttttagcgttattacgtaaaaaatcttgccagctttccccttctaaagggcaaaagtgagtatggtgcctatctaacatctcaatggctaaggcgtcgagcaaagcccgcttattttttacatgccaatacaatgtaggctgctctacacctagcttctgggcgagtttacgggttgttaaaccttcgattccgacctcattaagcagctctaatgcgctgttaatcactttacttttatctaatctggacatattcaccaccctgaattgactctcttccgggcgctatcatgccataccgcgaaaggttttgcgccattcgatggcgcgccgccattgcttgtgcaatgtacatcagagattttgagacacaaccaattattgaaggcctccctaacggggggcctttttttgtttctggtcccccgcttaacgatcgttggctgttttcagcaggacgcactgacctccctatcagtgatagagattgacatccctatcagtgatagagatactgagcacagctgtcaccggatgtgctttccggtctgatgagtccgtgaggacgaaacagcctctacaaataattttgtttaaatcacacgggtaaggaggtatttaaatgaaaacactgtcccaagcacagtcgaagacgagtagccagcagttttctttcaccggtaattctagcgctaacgtgattatcggcaaccagaaactaactatcaacgacgtcgcccgcgttgctcggaacgggaccttagtaagcctgactaacaacactgatatacttcaaggcattcaggcgtcctgtgattatatcaataacgcagttgagtctggtgaaccaatttacggtgtgacctcaggcttcggcggtatggcgaacgttgctatcagccgtgaacaggcctccgaactgcaatcgaatttggtatggtttcataaaactggtgctgggaacaaactccctttggcggacgtacgtgcagcaatgctgctgcgcgccaactcgcatatgcgtggcgcgtccggtatccgtctggagctgatcaaacgtatggaaatcttcttgaacgctggtgttactccgtacgtttatgaatttggatctatcggcgcttctggagatctggtcccgctgagctacattacgggttccctgattggccttgacccgagcttcaaggtggatttcaacggcaaagaaatggacgccccgaccgcgttacgccagttaaatctgtctcccctgacacttctgcctaaagaaagtctagctatggtcaatgggacctcagtcatgactggcatcgcagctaactgcgtatacgacacccagatcctgactgcgattgcaatgggtgttcacgctctggatatccaggccctgaacggcaccaaccagtctttccacccgtttatccataactctaagccgcacccaggtcagctgtgggcggctgatcagatgatatcattgctggctaactcgcaactggtacgggacgagctggacggcaaacatgattaccgcgaccacgagctgatccaggatcgttatagcctgcgttgccttccgcagtacctgggtccgattgtggacggtatctcacagatagcaaaacaaatcgaaattgaaattaactccgttactgataaccctctgattgacgtcgataaccaggcgtcgtaccacggcggaaatttcctgggtcagtatgttggcatgggtatggaccaccttcgctactatatcggcctgctggcgaaacacctggatgtgcagattgcgctgctagctagtcccgaatttagcaacggactgccgccatctttattgggcaaccgtgaacgtaaggttaacatgggtctgaaaggtttacaaatctgtggcaattccatcatgccgctgctgacgttctacggcaatagcatcgccgaccgctttccgacccatgcagagcaattcaaccagaatatcaactctcagggctacacctccgcaacgctggcgcgacgtagtgttgatatcttccaaaactacgttgcgattgccctgatgtttggcgtccaggctgtagacctgaggacttataaaaagactggccattacgatgcgcgtgcttgcctctctccggctaccgaacgcctgtattccgccgtgcgtcacgtagttggtcagaaacctacttcagatcgcccatacatctggaacgataacgagcagggtctggatgaacacatcgctcgcatctccgctgacattgccgctggcggagtaattgttcaagctgtacaggatatcctgccgtgcctgcactaaccggcttatcggtcagtttcacctgatttacgtaaaaacccgcttcggcgggtttttgcttttggaggggcagaaagatgaatgactgtccacgacgctatacccaaaagaaa

SEQ ID NO: 238 - DNA, 5122 bp, synthetic construct
  source 1..5122: mol_type = other DNA
aggctaggtggaggctcagtgatgataagtctgcgatggtggatgcatgtgtcatggtcatagctgtttcctgtgtgaaattgttatccgctcagagggcacaatcctattccgcgctatccgacaatctccaagacattaggtggagttcagttcggcgagcggaaatggcttacgaacggggcggagatttcctggaagatgccaggaagatacttaacagggaagtgagagggccgcggcaaagccgtttttccataggctccgcccccctgacaagcatcacgaaatctgacgctcaaatcagtggtggcgaaacccgacaggactataaagataccaggcgtttccccctggcggctccctcgtgcgctctcctgttcctgcctttcggtttaccggtgtcattccgctgttatggccgcgtttgtctcattccacgcctgacactcagttccgggtaggcagttcgctccaagctggactgtatgcacgaaccccccgttcagtccgaccgctgcgccttatccggtaactatcgtcttgagtccaacccggaaagacatgcaaaagcaccactggcagcagccactggtaattgatttagaggagttagtcttgaagtcatgcgccggttaaggctaaactgaaaggacaagttttggtgactgcgctcctccaagccagttacctcggttcaaagagttggtagctcagagaaccttcgaaaaaccgccctgcaaggcggttttttcgttttcagagcaagagattacgcgcagaccaaaacgatctcaagaagatcatcttattaagtctgacgctctattcaacaaagccgccgtccatgggtagggggcttcaaatcgtcctcgtgataccaattcggagcctgcttttttgtacaaacttgttgataatggcaattcaaggatcttcacctagatccttttaaattaaaaatgaagttttaaatcaatctaaagtatatatgagtaaacttggtctgacagttaccaatgcttaatcagtgaggcacctatctcagcgatctgtctatttcgttcatccatagttgcctgactccccgtcgtgtagataactacgatacgggagggcttaccatctggccccagtgctgcaatgataccgcgagagccacgctcaccggctccagatttatcagcaataaaccagccagccggaagggccgagcgcagaagtggtcctgcaactttatccgcctccatccagtctattaattgttgccgggaagctagagtaagtagttcgccagttaatagtttgcgcaacgttgttgccattgctacaggcatcgtggtgtcacgctcgtcgtttggtatggcttcattcagctccggttcccaacgatcaaggcgagttacatgatcccccatgttgtgcaaaaaagcggttagctccttcggtcctccgatcgttgtcagaagtaagttggccgcagtgttatcactcatggttatggcagcactgcataattctcttactgtcatgccatccgtaagatgcttttctgtgactggtgagtactcaaccaagtcattctgagaatagtgtatgcggcgaccgagttgctcttgcccggcgtcaatacgggataataccgcgccacatagcagaactttaaaagtgctcatcattggaaaacgttcttcggggcgaaaactctcaaggatcttaccgctgttgagatccagttcgatgtaacccactcgtgcacccaactgatcttcagcatcttttactttcaccagcgtttctgggtgagcaaaaacaggaaggcaaaatgccgcaaaaaagggaataagggcgacacggaaatgttgaatactcatactcttcctttttcaatattattgaagcatttatcagggttattgtctcatgagcggatacatatttgaatgtatttagaaaaataaacaaataggggttccgcgcacatttccccgaaaagtgccagatacctgaaacaaaacccatcgtacggccaaggaagtctccaataactgtgatccaccacaagcgccagggttttcccagtcacgacgttgtaaaacgacggccagtcatgcataatccgcacgcatctggaataaggaagtgccattccgcctgacctttgcctatgaggaccaaaacgaaaaaacaccctttcgggtgtcttttctggaatttggtaccgagaggctccatgattcagtatgacttgcctttggtcgaaaaaaaaagcccgcactgtcaggtgcgggcttttttctgtgtttccttattaggacccactttcacatttaagttgtttttctaatccgcatatgatcaattcaaggccgaataagaaggctggctctgcaccttggtgatcaaataattcgatagcttgtcgtaataatggcggcatactatcagtagtaggtgtttccctttcttctttagcgacttgatgctcttgatcttccaatacgcaacctaaagtaaaatgccccacagcgctgagtgcatataatgcattctctagtgaaaaaccttgttggcataaaaaggctaattgattttcgagagtttcatactgtttttctgtaggccgtgtacctaaatgtacttttgctccatcgcgatgacttagtaaagcacatctaaaacttttagcgttattacgtaaaaaatcttgccagctttccccttctaaagggcaaaagtgagtatggtgcctatctaacatctcaatggctaaggcgtcgagcaaagcccgcttattttttacatgccaatacaatgtaggctgctctacacctagcttctgggcgagtttacgggttgttaaaccttcgattccgacctcattaagcagctctaatgcgctgttaatcactttacttttatctaatctggacatattcaccaccctgaattgactctcttccgggcgctatcatgccataccgcgaaaggttttgcgccattcgatggcgcgccgccattgcttgtgcaatgtacatcagagattttgagacacaaccaattattgaaggcctccctaacggggggcctttttttgtttctggtcccccgcttaacgatcgttggctgttttcagcaggacgcactgacctccctatcagtgatagagattgacatccctatcagtgatagagatactgagcacagctgtcaccggatgtgctttccggtctgatgagtccgtgaggacgaaacagcctctacaaataattttgtttaaatcacacgggtaaggaggtatttaaatgaaaacactgtcccaagcacagtcgaagacgagtagccagcagttttctttcaccggtaattctagcgctaacgtgattatcggcaaccagaaactaactatcaacgacgtcgcccgcgttgctcggaacgggaccttagtaagcctgactaacaacactgatatacttcaaggcattcaggcgtcctgtgattatatcaataacgcagttgagtctggtgaaccaatttacggtgtgacctcaggcttcggcggtatggcgaacgttgctatcagccgtgaacaggcctccgaactgcaaaagaatgcggtatggtttcataaaactggtgctgggaacaaactccctttggcggacgtacgtgcagcaatgctgctgcgcgccaactcgcatatgcgtggcgcgtccggtatccgtctggagctgatcaaacgtatggaaatcttcttgaacgctggtgttactccgtacgtttatgaatttggatctatcggcgcttctggagatctggtcccgctgagctacattacgggttccctgattggccttgacccgagcttcaaggtggatttcaacggcaaagaaatggacgccccgaccgcgttacgccagttaaatctgtctcccctgacacttctgcctaaagaaggtattgctatgaataatgggacctcagtcatgactggcatcgcagctaactgcgtatacgacacccagatcctgactgcgattgcaatgggtgttcacgctctggatatccaggccctgaacggcaccaaccagtctttccacccgtttatccataactctaagccgcacccaggtcagctgtgggcggctgatcagatgatatcattgctggctaactcgcaactggtacgggacgagctggacggcaaacatgattaccgcgaccacgagctgatccaggatcgttatagcctgcgttgccttccgcagtacctgggtccgattgtggacggtatctcacagatagcaaaacaaatcgaaattgaaattaactccgttactgataaccctctgattgacgtcgataaccaggcgtcgtaccacggcggaaatttcctgggtcagtatgttggcatgggtatggaccaccttcgctactatatcggcctgctggcgaaacacctggatgtgcagattgcgctgctagctagtcccgaatttagcaacggactgccgccatctttattgggcaaccgtgaacgtaaggttaacatgggtctgaaaggtttacaaatctgtggcaattccatcatgccgctgctgacgttctacggcaatagcatcgccgaccgctttccgacccatgcagagcaattcaaccagaatatcaactctcagggctacacctccgcaacgctggcgcgacgtagtgttgatatcttccaaaactacgttgcgattgccctgatgtttggcgtccaggctgtagacctgaggacttataaaaagactggccattacgatgcgcgtgcttgcctctctccggctaccgaacgcctgtattccgccgtgcgtcacgtagttggtcagaaacctacttcagatcgcccatacatctggaacgataacgagcagggtctggatgaacacatcgctcgcatctccgctgacattgccgctggcggagtaattgttcaagctgtacaggatatcctgccgtgcctgcactaaccggcttatcggtcagtttcacctgatttacgtaaaaacccgcttcggcgggtttttgcttttggaggggcagaaagatgaatgactgtccacgacgctatacccaaaagaaa

SEQ ID NO: 239 - DNA, 5122 bp, synthetic construct
  source 1..5122: mol_type = other DNA
aggctaggtggaggctcagtgatgataagtctgcgatggtggatgcatgtgtcatggtcatagctgtttcctgtgtgaaattgttatccgctcagagggcacaatcctattccgcgctatccgacaatctccaagacattaggtggagttcagttcggcgagcggaaatggcttacgaacggggcggagatttcctggaagatgccaggaagatacttaacagggaagtgagagggccgcggcaaagccgtttttccataggctccgcccccctgacaagcatcacgaaatctgacgctcaaatcagtggtggcgaaacccgacaggactataaagataccaggcgtttccccctggcggctccctcgtgcgctctcctgttcctgcctttcggtttaccggtgtcattccgctgttatggccgcgtttgtctcattccacgcctgacactcagttccgggtaggcagttcgctccaagctggactgtatgcacgaaccccccgttcagtccgaccgctgcgccttatccggtaactatcgtcttgagtccaacccggaaagacatgcaaaagcaccactggcagcagccactggtaattgatttagaggagttagtcttgaagtcatgcgccggttaaggctaaactgaaaggacaagttttggtgactgcgctcctccaagccagttacctcggttcaaagagttggtagctcagagaaccttcgaaaaaccgccctgcaaggcggttttttcgttttcagagcaagagattacgcgcagaccaaaacgatctcaagaagatcatcttattaagtctgacgctctattcaacaaagccgccgtccatgggtagggggcttcaaatcgtcctcgtgataccaattcggagcctgcttttttgtacaaacttgttgataatggcaattcaaggatcttcacctagatccttttaaattaaaaatgaagttttaaatcaatctaaagtatatatgagtaaacttggtctgacagttaccaatgcttaatcagtgaggcacctatctcagcgatctgtctatttcgttcatccatagttgcctgactccccgtcgtgtagataactacgatacgggagggcttaccatctggccccagtgctgcaatgataccgcgagagccacgctcaccggctccagatttatcagcaataaaccagccagccggaagggccgagcgcagaagtggtcctgcaactttatccgcctccatccagtctattaattgttgccgggaagctagagtaagtagttcgccagttaatagtttgcgcaacgttgttgccattgctacaggcatcgtggtgtcacgctcgtcgtttggtatggcttcattcagctccggttcccaacgatcaaggcgagttacatgatcccccatgttgtgcaaaaaagcggttagctccttcggtcctccgatcgttgtcagaagtaagttggccgcagtgttatcactcatggttatggcagcactgcataattctcttactgtcatgccatccgtaagatgcttttctgtgactggtgagtactcaaccaagtcattctgagaatagtgtatgcggcgaccgagttgctcttgcccggcgtcaatacgggataataccgcgccacatagcagaactttaaaagtgctcatcattggaaaacgttcttcggggcgaaaactctcaaggatcttaccgctgttgagatccagttcgatgtaacccactcgtgcacccaactgatcttcagcatcttttactttcaccagcgtttctgggtgagcaaaaacaggaaggcaaaatgccgcaaaaaagggaataagggcgacacggaaatgttgaatactcatactcttcctttttcaatattattgaagcatttatcagggttattgtctcatgagcggatacatatttgaatgtatttagaaaaataaacaaataggggttccgcgcacatttccccgaaaagtgccagatacctgaaacaaaacccatcgtacggccaaggaagtctccaataactgtgatccaccacaagcgccagggttttcccagtcacgacgttgtaaaacgacggccagtcatgcataatccgcacgcatctggaataaggaagtgccattccgcctgacctttgcctatgaggaccaaaacgaaaaaacaccctttcgggtgtcttttctggaatttggtaccgagaggctccatgattcagtatgacttgcctttggtcgaaaaaaaaagcccgcactgtcaggtgcgggcttttttctgtgtttccttattaggacccactttcacatttaagttgtttttctaatccgcatatgatcaattcaaggccgaataagaaggctggctctgcaccttggtgatcaaataattcgatagcttgtcgtaataatggcggcatactatcagtagtaggtgtttccctttcttctttagcgacttgatgctcttgatcttccaatacgcaacctaaagtaaaatgccccacagcgctgagtgcatataatgcattctctagtgaaaaaccttgttggcataaaaaggctaattgattttcgagagtttcatactgtttttctgtaggccgtgtacctaaatgtacttttgctccatcgcgatgacttagtaaagcacatctaaaacttttagcgttattacgtaaaaaatcttgccagctttccccttctaaagggcaaaagtgagtatggtgcctatctaacatctcaatggctaaggcgtcgagcaaagcccgcttattttttacatgccaatacaatgtaggctgctctacacctagcttctgggcgagtttacgggttgttaaaccttcgattccgacctcattaagcagctctaatgcgctgttaatcactttacttttatctaatctggacatattcaccaccctgaattgactctcttccgggcgctatcatgccataccgcgaaaggttttgcgccattcgatggcgcgccgccattgcttgtgcaatgtacatcagagattttgagacacaaccaattattgaaggcctccctaacggggggcctttttttgtttctggtcccccgcttaacgatcgttggctgttttcagcaggacgcactgacctccctatcagtgatagagattgacatccctatcagtgatagagatactgagcacagctgtcaccggatgtgctttccggtctgatgagtccgtgaggacgaaacagcctctacaaataattttgtttaaatcacacgggtaaggaggtatttaaatgaaaacactgtcccaagcacagtcgaagacgagtagccagcagttttctttcaccggtaattctagcgctaacgtgattatcggcaaccagaaactaactatcaacgacgtcgcccgcgttgctcggaacgggaccttagtaagcctgactaacaacactgatatacttcaaggcattcaggcgtcctgtgattatatcaataacgcagttgagtctggtgaaccaatttacggtgtgacctcaggcttcggcggtatggcgaacgttgctatcagccgtgaacaggcctccgaactgcaaagtaatttggtatggtttcataaaactggtgctgggaacaaactccctttggcggacgtacgtgcagcaatgctgctgcgcgccaactcgcatatgcgtggcgcgtccggtatccgtctggagctgatcaaacgtatggaaatcttcttgaacgctggtgttactccgtacgtttatgaatttggatctatcggcgcttctggagatctggtcccgctgagctacattacgggttccctgattggccttgacccgagcttcaaggtggatttcaacggcaaagaaatggacgccccgaccgcgttacgccagttaaatctgtctcccctgacacttctgcctaaagaaggtctagctatgaataatgggacctcagtcatgactggcatcgcagctaactgcgtatacgacacccagatcctgactgcgattgcaatgggtgttcacgctctggatatccaggccctgaacggcaccaaccagtctttccacccgtttatccataactctaagccgcacccaggtcagctgtgggcggctgatcagatgatatcattgctggctaactcgcaactggtacgggacgagctggacggcaaacatgattaccgcgaccacgagctgatccaggatcgttatagcctgcgttgccttccgcagtacctgggtccgattgtggacggtatctcacagatagcaaaacaaatcgaaattgaaattaactccgttactgataaccctctgattgacgtcgataaccaggcgtcgtaccacggcggaaatttcctgggtcagtatgttggcatgggtatggaccaccttcgctactatatcggcctgctggcgaaacacctggatgtgcagattgcgctgctagctagtcccgaatttagcaacggactgccgccatctttattgggcaaccgtgaacgtaaggttaacatgggtctgaaaggtttacaaatctgtggcaattccatcatgccgctgctgacgttctacggcaatagcatcgccgaccgctttccgacccatgcagagcaattcaaccagaatatcaactctcagggctacacctccgcaacgctggcgcgacgtagtgttgatatcttccaaaactacgttgcgattgccctgatgtttggcgtccaggctgtagacctgaggacttataaaaagactggccattacgatgcgcgtgcttgcctctctccggctaccgaacgcctgtattccgccgtgcgtcacgtagttggtcagaaacctacttcagatcgcccatacatctggaacgataacgagcagggtctggatgaacacatcgctcgcatctccgctgacattgccgctggcggagtaattgttcaagctgtacaggatatcctgccgtgcctgcactaaccggcttatcggtcagtttcacctgatttacgtaaaaacccgcttcggcgggtttttgcttttggaggggcagaaagatgaatgactgtccacgacgctatacccaaaagaaa

SEQ ID NO: 240 - DNA, 5122 bp, synthetic construct
  source 1..5122: mol_type = other DNA
aggctaggtggaggctcagtgatgataagtctgcgatggtggatgcatgtgtcatggtcatagctgtttcctgtgtgaaattgttatccgctcagagggcacaatcctattccgcgctatccgacaatctccaagacattaggtggagttcagttcggcgagcggaaatggcttacgaacggggcggagatttcctggaagatgccaggaagatacttaacagggaagtgagagggccgcggcaaagccgtttttccataggctccgcccccctgacaagcatcacgaaatctgacgctcaaatcagtggtggcgaaacccgacaggactataaagataccaggcgtttccccctggcggctccctcgtgcgctctcctgttcctgcctttcggtttaccggtgtcattccgctgttatggccgcgtttgtctcattccacgcctgacactcagttccgggtaggcagttcgctccaagctggactgtatgcacgaaccccccgttcagtccgaccgctgcgccttatccggtaactatcgtcttgagtccaacccggaaagacatgcaaaagcaccactggcagcagccactggtaattgatttagaggagttagtcttgaagtcatgcgccggttaaggctaaactgaaaggacaagttttggtgactgcgctcctccaagccagttacctcggttcaaagagttggtagctcagagaaccttcgaaaaaccgccctgcaaggcggttttttcgttttcagagcaagagattacgcgcagaccaaaacgatctcaagaagatcatcttattaagtctgacgctctattcaacaaagccgccgtccatgggtagggggcttcaaatcgtcctcgtgataccaattcggagcctgcttttttgtacaaacttgttgataatggcaattcaaggatcttcacctagatccttttaaattaaaaatgaagttttaaatcaatctaaagtatatatgagtaaacttggtctgacagttaccaatgcttaatcagtgaggcacctatctcagcgatctgtctatttcgttcatccatagttgcctgactccccgtcgtgtagataactacgatacgggagggcttaccatctggccccagtgctgcaatgataccgcgagagccacgctcaccggctccagatttatcagcaataaaccagccagccggaagggccgagcgcagaagtggtcctgcaactttatccgcctccatccagtctattaattgttgccgggaagctagagtaagtagttcgccagttaatagtttgcgcaacgttgttgccattgctacaggcatcgtggtgtcacgctcgtcgtttggtatggcttcattcagctccggttcccaacgatcaaggcgagttacatgatcccccatgttgtgcaaaaaagcggttagctccttcggtcctccgatcgttgtcagaagtaagttggccgcagtgttatcactcatggttatggcagcactgcataattctcttactgtcatgccatccgtaagatgcttttctgtgactggtgagtactcaaccaagtcattctgagaatagtgtatgcggcgaccgagttgctcttgcccggcgtcaatacgggataataccgcgccacatagcagaactttaaaagtgctcatcattggaaaacgttcttcggggcgaaaactctcaaggatcttaccgctgttgagatccagttcgatgtaacccactcgtgcacccaactgatcttcagcatcttttactttcaccagcgtttctgggtgagcaaaaacaggaaggcaaaatgccgcaaaaaagggaataagggcgacacggaaatgttgaatactcatactcttcctttttcaatattattgaagcatttatcagggttattgtctcatgagcggatacatatttgaatgtatttagaaaaataaacaaataggggttccgcgcacatttccccgaaaagtgccagatacctgaaacaaaacccatcgtacggccaaggaagtctccaataactgtgatccaccacaagcgccagggttttcccagtcacgacgttgtaaaacgacggccagtcatgcataatccgcacgcatctggaataaggaagtgccattccgcctgacctttgcctatgaggaccaaaacgaaaaaacaccctttcgggtgtcttttctggaatttggtaccgagaggctccatgattcagtatgacttgcctttggtcgaaaaaaaaagcccgcactgtcaggtgcgggcttttttctgtgtttccttattaggacccactttcacatttaagttgtttttctaatccgcatatgatcaattcaaggccgaataagaaggctggctctgcaccttggtgatcaaataattcgatagcttgtcgtaataatggcggcatactatcagtagtaggtgtttccctttcttctttagcgacttgatgctcttgatcttccaatacgcaacctaaagtaaaatgccccacagcgctgagtgcatataatgcattctctagtgaaaaaccttgttggcataaaaaggctaattgattttcgagagtttcatactgtttttctgtaggccgtgtacctaaatgtacttttgctccatcgcgatgacttagtaaagcacatctaaaacttttagcgttattacgtaaaaaatcttgccagctttccccttctaaagggcaaaagtgagtatggtgcctatctaacatctcaatggctaaggcgtcgagcaaagcccgcttattttttacatgccaatacaatgtaggctgctctacacctagcttctgggcgagtttacgggttgttaaaccttcgattccgacctcattaagcagctctaatgcgctgttaatcactttacttttatctaatctggacatattcaccaccctgaattgactctcttccgggcgctatcatgccataccgcgaaaggttttgcgccattcgatggcgcgccgccattgcttgtgcaatgtacatcagagattttgagacacaaccaattattgaaggcctccctaacggggggcctttttttgtttctggtcccccgcttaacgatcgttggctgttttcagcaggacgcactgacctccctatcagtgatagagattgacatccctatcagtgatagagatactgagcacagctgtcaccggatgtgctttccggtctgatgagtccgtgaggacgaaacagcctctacaaataattttgtttaaatcacacgggtaaggaggtatttaaatgaaaacactgtcccaagcacagtcgaagacgagtagccagcagttttctttcaccggtaattctagcgctaacgtgattatcggcaaccagaaactaactatcaacgacgtcgcccgcgttgctcggaacgggaccttagtaagcctgactaacaacactgatatacttcaaggcattcaggcgtcctgtgattatatcaataacgcagttgagtctggtgaaccaatttacggtgtgacctcaggcttcggcggtatggcgaacgttgctatcagccgtgaacaggcctccgaactgcaacacaatatggtatggtttatgaaaactggtgctgggaacaaactccctttggcggacgtacgtgcagcaatgctgctgcgcgccaactcgcatatgcgtggcgcgtccggtatccgtctggagctgatcaaacgtatggaaatcttcttgaacgctggtgttactccgtacgtttatgaatttggatctatcggcgcttctggagatctggtcccgctgagctacattacgggttccctgattggccttgacccgagcttcaaggtggatttcaacggcaaagaaatggacgccccgaccgcgttacgccagttaaatctgtctcccctgacacttctgcctaaagaaggtattgctatgatgaatgggacctcagtcatgactggcatcgcagctaactgcgtatacgacacccagatcctgactgcgattgcaatgggtgttcacgctctggatatccaggccctgaacggcaccaaccagtctttccacccgtttatccataactctaagccgcacccaggtcagctgtgggcggctgatcagatgatatcattgctggctaactcgcaactggtacgggacgagctggacggcaaacatgattaccgcgaccacgagctgatccaggatcgttatagcctgcgttgccttccgcagtacctgggtccgattgtggacggtatctcacagatagcaaaacaaatcgaaattgaaattaactccgttactgataaccctctgattgacgtcgataaccaggcgtcgtaccacggcggaaatttcctgggtcagtatgttggcatgggtatggaccaccttcgctactatatcggcctgctggcgaaacacctggatgtgcagattgcgctgctagctagtcccgaatttagcaacggactgccgccatctttattgggcaaccgtgaacgtaaggttaacatgggtctgaaaggtttacaaatctgtggcaattccatcatgccgctgctgacgttctacggcaatagcatcgccgaccgctttccgacccatgcagagcaattcaaccagaatatcaactctcagggctacacctccgcaacgctggcgcgacgtagtgttgatatcttccaaaactacgttgcgattgccctgatgtttggcgtccaggctgtagacctgaggacttataaaaagactggccattacgatgcgcgtgcttgcctctctccggctaccgaacgcctgtattccgccgtgcgtcacgtagttggtcagaaacctacttcagatcgcccatacatctggaacgataacgagcagggtctggatgaacacatcgctcgcatctccgctgacattgccgctggcggagtaattgttcaagctgtacaggatatcctgccgtgcctgcactaaccggcttatcggtcagtttcacctgatttacgtaaaaacccgcttcggcgggtttttgcttttggaggggcagaaagatgaatgactgtccacgacgctatacccaaaagaaa

SEQ ID NO: 241 - DNA, 5122 bp, synthetic construct
  source 1..5122: mol_type = other DNA
aggctaggtggaggctcagtgatgataagtctgcgatggtggatgcatgtgtcatggtcatagctgtttcctgtgtgaaattgttatccgctcagagggcacaatcctattccgcgctatccgacaatctccaagacattaggtggagttcagttcggcgagcggaaatggcttacgaacggggcggagatttcctggaagatgccaggaagatacttaacagggaagtgagagggccgcggcaaagccgtttttccataggctccgcccccctgacaagcatcacgaaatctgacgctcaaatcagtggtggcgaaacccgacaggactataaagataccaggcgtttccccctggcggctccctcgtgcgctctcctgttcctgcctttcggtttaccggtgtcattccgctgttatggccgcgtttgtctcattccacgcctgacactcagttccgggtaggcagttcgctccaagctggactgtatgcacgaaccccccgttcagtccgaccgctgcgccttatccggtaactatcgtcttgagtccaacccggaaagacatgcaaaagcaccactggcagcagccactggtaattgatttagaggagttagtcttgaagtcatgcgccggttaaggctaaactgaaaggacaagttttggtgactgcgctcctccaagccagttacctcggttcaaagagttggtagctcagagaaccttcgaaaaaccgccctgcaaggcggttttttcgttttcagagcaagagattacgcgcagaccaaaacgatctcaagaagatcatcttattaagtctgacgctctattcaacaaagccgccgtccatgggtagggggcttcaaatcgtcctcgtgataccaattcggagcctgcttttttgtacaaacttgttgataatggcaattcaaggatcttcacctagatccttttaaattaaaaatgaagttttaaatcaatctaaagtatatatgagtaaacttggtctgacagttaccaatgcttaatcagtgaggcacctatctcagcgatctgtctatttcgttcatccatagttgcctgactccccgtcgtgtagataactacgatacgggagggcttaccatctggccccagtgctgcaatgataccgcgagagccacgctcaccggctccagatttatcagcaataaaccagccagccggaagggccgagcgcagaagtggtcctgcaactttatccgcctccatccagtctattaattgttgccgggaagctagagtaagtagttcgccagttaatagtttgcgcaacgttgttgccattgctacaggcatcgtggtgtcacgctcgtcgtttggtatggcttcattcagctccggttcccaacgatcaaggcgagttacatgatcccccatgttgtgcaaaaaagcggttagctccttcggtcctccgatcgttgtcagaagtaagttggccgcagtgttatcactcatggttatggcagcactgcataattctcttactgtcatgccatccgtaagatgcttttctgtgactggtgagtactcaaccaagtcattctgagaatagtgtatgcggcgaccgagttgctcttgcccggcgtcaatacgggataataccgcgccacatagcagaactttaaaagtgctcatcattggaaaacgttcttcggggcgaaaactctcaaggatcttaccgctgttgagatccagttcgatgtaacccactcgtgcacccaactgatcttcagcatcttttactttcaccagcgtttctgggtgagcaaaaacaggaaggcaaaatgccgcaaaaaagggaataagggcgacacggaaatgttgaatactcatactcttcctttttcaatattattgaagcatttatcagggttattgtctcatgagcggatacatatttgaatgtatttagaaaaataaacaaataggggttccgcgcacatttccccgaaaagtgccagatacctgaaacaaaacccatcgtacggccaaggaagtctccaataactgtgatccaccacaagcgccagggttttcccagtcacgacgttgtaaaacgacggccagtcatgcataatccgcacgcatctggaataaggaagtgccattccgcctgacctttgcctatgaggaccaaaacgaaaaaacaccctttcgggtgtcttttctggaatttggtaccgagaggctccatgattcagtatgacttgcctttggtcgaaaaaaaaagcccgcactgtcaggtgcgggcttttttctgtgtttccttattaggacccactttcacatttaagttgtttttctaatccgcatatgatcaattcaaggccgaataagaaggctggctctgcaccttggtgatcaaataattcgatagcttgtcgtaataatggcggcatactatcagtagtaggtgtttccctttcttctttagcgacttgatgctcttgatcttccaatacgcaacctaaagtaaaatgccccacagcgctgagtgcatataatgcattctctagtgaaaaaccttgttggcataaaaaggctaattgattttcgagagtttcatactgtttttctgtaggccgtgtacctaaatgtacttttgctccatcgcgatgacttagtaaagcacatctaaaacttttagcgttattacgtaaaaaatcttgccagctttccccttctaaagggcaaaagtgagtatggtgcctatctaacatctcaatggctaaggcgtcgagcaaagcccgcttattttttacatgccaatacaatgtaggctgctctacacctagcttctgggcgagtttacgggttgttaaaccttcgattccgacctcattaagcagctctaatgcgctgttaatcactttacttttatctaatctggacatattcaccaccctgaattgactctcttccgggcgctatcatgccataccgcgaaaggttttgcgccattcgatggcgcgccgccattgcttgtgcaatgtacatcagagattttgagacacaaccaattattgaaggcctccctaacggggggcctttttttgtttctggtcccccgcttaacgatcgttggctgttttcagcaggacgcactgacctccctatcagtgatagagattgacatccctatcagtgatagagatactgagcacagctgtcaccggatgtgctttccggtctgatgagtccgtgaggacgaaacagcctctacaaataattttgtttaaatcacacgggtaaggaggtatttaaatgaaaacactgtcccaagcacagtcgaagacgagtagccagcagttttctttcaccggtaattctagcgctaacgtgattatcggcaaccagaaactaactatcaacgacgtcgcccgcgttgctcggaacgggaccttagtaagcctgactaacaacactgatatacttcaaggcattcaggcgtcctgtgattatatcaataacgcagttgagtctggtgaaccaatttacggtgtgacctcaggcttcggcggtatggcgaacgttgctatcagccgtgaacaggcctccgaactgcaaaagaatgcggtatggtatgtgaaaactggtgctgggaacaaactccctttggcggacgtacgtgcagcaatgctgctgcgcgccaactcgcatatgcgtggcgcgtccggtatccgtctggagctgatcaaacgtatggaaatcttcttgaacgctggtgttactccgtacgtttatgaatttggatctatcggcgcttctggagatctggtcccgctgagctacattacgggttccctgattggccttgacccgagcttcaaggtggatttcaacggcaaagaaatggacgccccgaccgcgttacgccagttaaatctgtctcccctgacacttctgcctaaagaagcgattgctatgaataatgggacctcagtcatgactggcatcgcagctaactgcgtatacgacacccagatcctgactgcgattgcaatgggtgttcacgctctggatatccaggccctgaacggcaccaaccagtctttccacccgtttatccataactctaagccgcacccaggtcagctgtgggcggctgatcagatgatatcattgctggctaactcgcaactggtacgggacgagctggacggcaaacatgattaccgcgaccacgagctgatccaggatcgttatagcctgcgttgccttccgcagtacctgggtccgattgtggacggtatctcacagatagcaaaacaaatcgaaattgaaattaactccgttactgataaccctctgattgacgtcgataaccaggcgtcgtaccacggcggaaatttcctgggtcagtatgttggcatgggtatggaccaccttcgctactatatcggcctgctggcgaaacacctggatgtgcagattgcgctgctagctagtcccgaatttagcaacggactgccgccatctttattgggcaaccgtgaacgtaaggttaacatgggtctgaaaggtttacaaatctgtggcaattccatcatgccgctgctgacgttctacggcaatagcatcgccgaccgctttccgacccatgcagagcaattcaaccagaatatcaactctcagggctacacctccgcaacgctggcgcgacgtagtgttgatatcttccaaaactacgttgcgattgccctgatgtttggcgtccaggctgtagacctgaggacttataaaaagactggccattacgatgcgcgtgcttgcctctctccggctaccgaacgcctgtattccgccgtgcgtcacgtagttggtcagaaacctacttcagatcgcccatacatctggaacgataacgagcagggtctggatgaacacatcgctcgcatctccgctgacattgccgctggcggagtaattgttcaagctgtacaggatatcctgccgtgcctgcactaaccggcttatcggtcagtttcacctgatttacgtaaaaacccgcttcggcgggtttttgcttttggaggggcagaaagatgaatgactgtccacgacgctatacccaaaagaaa

SEQ ID NO: 242 - DNA, 5122 bp, synthetic construct
  source 1..5122: mol_type = other DNA
aggctaggtggaggctcagtgatgataagtctgcgatggtggatgcatgtgtcatggtcatagctgtttcctgtgtgaaattgttatccgctcagagggcacaatcctattccgcgctatccgacaatctccaagacattaggtggagttcagttcggcgagcggaaatggcttacgaacggggcggagatttcctggaagatgccaggaagatacttaacagggaagtgagagggccgcggcaaagccgtttttccataggctccgcccccctgacaagcatcacgaaatctgacgctcaaatcagtggtggcgaaacccgacaggactataaagataccaggcgtttccccctggcggctccctcgtgcgctctcctgttcctgcctttcggtttaccggtgtcattccgctgttatggccgcgtttgtctcattccacgcctgacactcagttccgggtaggcagttcgctccaagctggactgtatgcacgaaccccccgttcagtccgaccgctgcgccttatccggtaactatcgtcttgagtccaacccggaaagacatgcaaaagcaccactggcagcagccactggtaattgatttagaggagttagtcttgaagtcatgcgccggttaaggctaaactgaaaggacaagttttggtgactgcgctcctccaagccagttacctcggttcaaagagttggtagctcagagaaccttcgaaaaaccgccctgcaaggcggttttttcgttttcagagcaagagattacgcgcagaccaaaacgatctcaagaagatcatcttattaagtctgacgctctattcaacaaagccgccgtccatgggtagggggcttcaaatcgtcctcgtgataccaattcggagcctgcttttttgtacaaacttgttgataatggcaattcaaggatcttcacctagatccttttaaattaaaaatgaagttttaaatcaatctaaagtatatatgagtaaacttggtctgacagttaccaatgcttaatcagtgaggcacctatctcagcgatctgtctatttcgttcatccatagttgcctgactccccgtcgtgtagataactacgatacgggagggcttaccatctggccccagtgctgcaatgataccgcgagagccacgctcaccggctccagatttatcagcaataaaccagccagccggaagggccgagcgcagaagtggtcctgcaactttatccgcctccatccagtctattaattgttgccgggaagctagagtaagtagttcgccagttaatagtttgcgcaacgttgttgccattgctacaggcatcgtggtgtcacgctcgtcgtttggtatggcttcattcagctccggttcccaacgatcaaggcgagttacatgatcccccatgttgtgcaaaaaagcggttagctccttcggtcctccgatcgttgtcagaagtaagttggccgcagtgttatcactcatggttatggcagcactgcataattctcttactgtcatgccatccgtaagatgcttttctgtgactggtgagtactcaaccaagtcattctgagaatagtgtatgcggcgaccgagttgctcttgcccggcgtcaatacgggataataccgcgccacatagcagaactttaaaagtgctcatcattggaaaacgttcttcggggcgaaaactctcaaggatcttaccgctgttgagatccagttcgatgtaacccactcgtgcacccaactgatcttcagcatcttttactttcaccagcgtttctgggtgagcaaaaacaggaaggcaaaatgccgcaaaaaagggaataagggcgacacggaaatgttgaatactcatactcttcctttttcaatattattgaagcatttatcagggttattgtctcatgagcggatacatatttgaatgtatttagaaaaataaacaaataggggttccgcgcacatttccccgaaaagtgccagatacctgaaacaaaacccatcgtacggccaaggaagtctccaataactgtgatccaccacaagcgccagggttttcccagtcacgacgttgtaaaacgacggccagtcatgcataatccgcacgcatctggaataaggaagtgccattccgcctgacctttgcctatgaggaccaaaacgaaaaaacaccctttcgggtgtcttttctggaatttggtaccgagaggctccatgattcagtatgacttgcctttggtcgaaaaaaaaagcccgcactgtcaggtgcgggcttttttctgtgtttccttattaggacccactttcacatttaagttgtttttctaatccgcatatgatcaattcaaggccgaataagaaggctggctctgcaccttggtgatcaaataattcgatagcttgtcgtaataatggcggcatactatcagtagtaggtgtttccctttcttctttagcgacttgatgctcttgatcttccaatacgcaacctaaagtaaaatgccccacagcgctgagtgcatataatgcattctctagtgaaaaaccttgttggcataaaaaggctaattgattttcgagagtttcatactgtttttctgtaggccgtgtacctaaatgtacttttgctccatcgcgatgacttagtaaagcacatctaaaacttttagcgttattacgtaaaaaatcttgccagctttccccttctaaagggcaaaagtgagtatggtgcctatctaacatctcaatggctaaggcgtcgagcaaagcccgcttattttttacatgccaatacaatgtaggctgctctacacctagcttctgggcgagtttacgggttgttaaaccttcgattccgacctcattaagcagctctaatgcgctgttaatcactttacttttatctaatctggacatattcaccaccctgaattgactctcttccgggcgctatcatgccataccgcgaaaggttttgcgccattcgatggcgcgccgccattgcttgtgcaatgtacatcagagattttgagacacaaccaattattgaaggcctccctaacggggggcctttttttgtttctggtcccccgcttaacgatcgttggctgttttcagcaggacgcactgacctccctatcagtgatagagattgacatccctatcagtgatagagatactgagcacagctgtcaccggatgtgctttccggtctgatgagtccgtgaggacgaaacagcctctacaaataattttgtttaaatcacacgggtaaggaggtatttaaatgaaaacactgtcccaagcacagtcgaagacgagtagccagcagttttctttcaccggtaattctagcgctaacgtgattatcggcaaccagaaactaactatcaacgacgtcgcccgcgttgctcggaacgggaccttagtaagcctgactaacaacactgatatacttcaaggcattcaggcgtcctgtgattatatcaataacgcagttgagtctggtgaaccaatttacggtgtgacctcaggcttcggcggtatggcgaacgttgctatcagccgtgaacaggcctccgaactgcaacacaatttggtatggtttatgaaaactggtgctgggaacaaactccctttggcggacgtacgtgcagcaatgctgctgcgcgccaactcgcatatgcgtggcgcgtccggtatccgtctggagctgatcaaacgtatggaaatcttcttgaacgctggtgttactccgtacgtttatgaatttggatctatcggcgcttctggagatctggtcccgctgagctacattacgggttccctgattggccttgacccgagcttcaaggtggatttcaacggcaaagaaatggacgccccgaccgcgttacgccagttaaatctgtctcccctgacacttctgcctaaagaaagtctagctatgctcaatgggacctcagtcatgactggcatcgcagctaactgcgtatacgacacccagatcctgactgcgattgcaatgggtgttcacgctctggatatccaggccctgaacggcaccaaccagtctttccacccgtttatccataactctaagccgcacccaggtcagctgtgggcggctgatcagatgatatcattgctggctaactcgcaactggtacgggacgagctggacggcaaacatgattaccgcgaccacgagctgatccaggatcgttatagcctgcgttgccttccgcagtacctgggtccgattgtggacggtatctcacagatagcaaaacaaatcgaaattgaaattaactccgttactgataaccctctgattgacgtcgataaccaggcgtcgtaccacggcggaaatttcctgggtcagtatgttggcatgggtatggaccaccttcgctactatatcggcctgctggcgaaacacctggatgtgcagattgcgctgctagctagtcccgaatttagcaacggactgccgccatctttattgggcaaccgtgaacgtaaggttaacatgggtctgaaaggtttacaaatctgtggcaattccatcatgccgctgctgacgttctacggcaatagcatcgccgaccgctttccgacccatgcagagcaattcaaccagaatatcaactctcagggctacacctccgcaacgctggcgcgacgtagtgttgatatcttccaaaactacgttgcgattgccctgatgtttggcgtccaggctgtagacctgaggacttataaaaagactggccattacgatgcgcgtgcttgcctctctccggctaccgaacgcctgtattccgccgtgcgtcacgtagttggtcagaaacctacttcagatcgcccatacatctggaacgataacgagcagggtctggatgaacacatcgctcgcatctccgctgacattgccgctggcggagtaattgttcaagctgtacaggatatcctgccgtgcctgcactaaccggcttatcggtcagtttcacctgatttacgtaaaaacccgcttcggcgggtttttgcttttggaggggcagaaagatgaatgactgtccacgacgctatacccaaaagaaa

SEQ ID NO: 243 - DNA, 5122 bp, synthetic construct
  source 1..5122: mol_type = other DNA
aggctaggtggaggctcagtgatgataagtctgcgatggtggatgcatgtgtcatggtcatagctgtttcctgtgtgaaattgttatccgctcagagggcacaatcctattccgcgctatccgacaatctccaagacattaggtggagttcagttcggcgagcggaaatggcttacgaacggggcggagatttcctggaagatgccaggaagatacttaacagggaagtgagagggccgcggcaaagccgtttttccataggctccgcccccctgacaagcatcacgaaatctgacgctcaaatcagtggtggcgaaacccgacaggactataaagataccaggcgtttccccctggcggctccctcgtgcgctctcctgttcctgcctttcggtttaccggtgtcattccgctgttatggccgcgtttgtctcattccacgcctgacactcagttccgggtaggcagttcgctccaagctggactgtatgcacgaaccccccgttcagtccgaccgctgcgccttatccggtaactatcgtcttgagtccaacccggaaagacatgcaaaagcaccactggcagcagccactggtaattgatttagaggagttagtcttgaagtcatgcgccggttaaggctaaactgaaaggacaagttttggtgactgcgctcctccaagccagttacctcggttcaaagagttggtagctcagagaaccttcgaaaaaccgccctgcaaggcggttttttcgttttcagagcaagagattacgcgcagaccaaaacgatctcaagaagatcatcttattaagtctgacgctctattcaacaaagccgccgtccatgggtagggggcttcaaatcgtcctcgtgataccaattcggagcctgcttttttgtacaaacttgttgataatggcaattcaaggatcttcacctagatccttttaaattaaaaatgaagttttaaatcaatctaaagtatatatgagtaaacttggtctgacagttaccaatgcttaatcagtgaggcacctatctcagcgatctgtctatttcgttcatccatagttgcctgactccccgtcgtgtagataactacgatacgggagggcttaccatctggccccagtgctgcaatgataccgcgagagccacgctcaccggctccagatttatcagcaataaaccagccagccggaagggccgagcgcagaagtggtcctgcaactttatccgcctccatccagtctattaattgttgccgggaagctagagtaagtagttcgccagttaatagtttgcgcaacgttgttgccattgctacaggcatcgtggtgtcacgctcgtcgtttggtatggcttcattcagctccggttcccaacgatcaaggcgagttacatgatcccccatgttgtgcaaaaaagcggttagctccttcggtcctccgatcgttgtcagaagtaagttggccgcagtgttatcactcatggttatggcagcactgcataattctcttactgtcatgccatccgtaagatgcttttctgtgactggtgagtactcaaccaagtcattctgagaatagtgtatgcggcgaccgagttgctcttgcccggcgtcaatacgggataataccgcgccacatagcagaactttaaaagtgctcatcattggaaaacgttcttcggggcgaaaactctcaaggatcttaccgctgttgagatccagttcgatgtaacccactcgtgcacccaactgatcttcagcatcttttactttcaccagcgtttctgggtgagcaaaaacaggaaggcaaaatgccgcaaaaaagggaataagggcgacacggaaatgttgaatactcatactcttcctttttcaatattattgaagcatttatcagggttattgtctcatgagcggatacatatttgaatgtatttagaaaaataaacaaataggggttccgcgcacatttccccgaaaagtgccagatacctgaaacaaaacccatcgtacggccaaggaagtctccaataactgtgatccaccacaagcgccagggttttcccagtcacgacgttgtaaaacgacggccagtcatgcataatccgcacgcatctggaataaggaagtgccattccgcctgacctttgcctatgaggaccaaaacgaaaaaacaccctttcgggtgtcttttctggaatttggtaccgagaggctccatgattcagtatgacttgcctttggtcgaaaaaaaaagcccgcactgtcaggtgcgggcttttttctgtgtttccttattaggacccactttcacatttaagttgtttttctaatccgcatatgatcaattcaaggccgaataagaaggctggctctgcaccttggtgatcaaataattcgatagcttgtcgtaataatggcggcatactatcagtagtaggtgtttccctttcttctttagcgacttgatgctcttgatcttccaatacgcaacctaaagtaaaatgccccacagcgctgagtgcatataatgcattctctagtgaaaaaccttgttggcataaaaaggctaattgattttcgagagtttcatactgtttttctgtaggccgtgtacctaaatgtacttttgctccatcgcgatgacttagtaaagcacatctaaaacttttagcgttattacgtaaaaaatcttgccagctttccccttctaaagggcaaaagtgagtatggtgcctatctaacatctcaatggctaaggcgtcgagcaaagcccgcttattttttacatgccaatacaatgtaggctgctctacacctagcttctgggcgagtttacgggttgttaaaccttcgattccgacctcattaagcagctctaatgcgctgttaatcactttacttttatctaatctggacatattcaccaccctgaattgactctcttccgggcgctatcatgccataccgcgaaaggttttgcgccattcgatggcgcgccgccattgcttgtgcaatgtacatcagagattttgagacacaaccaattattgaaggcctccctaacggggggcctttttttgtttctggtcccccgcttaacgatcgttggctgttttcagcaggacgcactgacctccctatcagtgatagagattgacatccctatcagtgatagagatactgagcacagctgtcaccggatgtgctttccggtctgatgagtccgtgaggacgaaacagcctctacaaataattttgtttaaatcacacgggtaaggaggtatttaaatgaaaacactgtcccaagcacagtcgaagacgagtagccagcagttttctttcaccggtaattctagcgctaacgtgattatcggcaaccagaaactaactatcaacgacgtcgcccgcgttgctcggaacgggaccttagtaagcctgactaacaacactgatatacttcaaggcattcaggcgtcctgtgattatatcaataacgcagttgagtctggtgaaccaatttacggtgtgacctcaggcttcggcggtatggcgaacgttgctatcagccgtgaacaggcctccgaactgcaagagaatatggtatggtatatgaaaactggtgctgggaacaaactccctttggcggacgtacgtgcagcaatgctgctgcgcgccaactcgcatatgcgtggcgcgtccggtatccgtctggagctgatcaaacgtatggaaatcttcttgaacgctggtgttactccgtacgtttatgaatttggatctatcggcgcttctggagatctggtcccgctgagctacattacgggttccctgattggccttgacccgagcttcaaggtggatttcaacggcaaagaaatggacgccccgaccgcgttacgccagttaaatctgtctcccctgacacttctgcctaaagaagcaattgctatgatgaatgggacctcagtcatgactggcatcgcagctaactgcgtatacgacacccagatcctgactgcgattgcaatgggtgttcacgctctggatatccaggccctgaacggcaccaaccagtctttccacccgtttatccataactctaagccgcacccaggtcagctgtgggcggctgatcagatgatatcattgctggctaactcgcaactggtacgggacgagctggacggcaaacatgattaccgcgaccacgagctgatccaggatcgttatagcctgcgttgccttccgcagtacctgggtccgattgtggacggtatctcacagatagcaaaacaaatcgaaattgaaattaactccgttactgataaccctctgattgacgtcgataaccaggcgtcgtaccacggcggaaatttcctgggtcagtatgttggcatgggtatggaccaccttcgctactatatcggcctgctggcgaaacacctggatgtgcagattgcgctgctagctagtcccgaatttagcaacggactgccgccatctttattgggcaaccgtgaacgtaaggttaacatgggtctgaaaggtttacaaatctgtggcaattccatcatgccgctgctgacgttctacggcaatagcatcgccgaccgctttccgacccatgcagagcaattcaaccagaatatcaactctcagggctacacctccgcaacgctggcgcgacgtagtgttgatatcttccaaaactacgttgcgattgccctgatgtttggcgtccaggctgtagacctgaggacttataaaaagactggccattacgatgcgcgtgcttgcctctctccggctaccgaacgcctgtattccgccgtgcgtcacgtagttggtcagaaacctacttcagatcgcccatacatctggaacgataacgagcagggtctggatgaacacatcgctcgcatctccgctgacattgccgctggcggagtaattgttcaagctgtacaggatatcctgccgtgcctgcactaaccggcttatcggtcagtttcacctgatttacgtaaaaacccgcttcggcgggtttttgcttttggaggggcagaaagatgaatgactgtccacgacgctatacccaaaagaaa

SEQ ID NO: 244 - DNA, 5122 bp, synthetic construct
  source 1..5122: mol_type = other DNA
aggctaggtggaggctcagtgatgataagtctgcgatggtggatgcatgtgtcatggtcatagctgtttcctgtgtgaaattgttatccgctcagagggcacaatcctattccgcgctatccgacaatctccaagacattaggtggagttcagttcggcgagcggaaatggcttacgaacggggcggagatttcctggaagatgccaggaagatacttaacagggaagtgagagggccgcggcaaagccgtttttccataggctccgcccccctgacaagcatcacgaaatctgacgctcaaatcagtggtggcgaaacccgacaggactataaagataccaggcgtttccccctggcggctccctcgtgcgctctcctgttcctgcctttcggtttaccggtgtcattccgctgttatggccgcgtttgtctcattccacgcctgacactcagttccgggtaggcagttcgctccaagctggactgtatgcacgaaccccccgttcagtccgaccgctgcgccttatccggtaactatcgtcttgagtccaacccggaaagacatgcaaaagcaccactggcagcagccactggtaattgatttagaggagttagtcttgaagtcatgcgccggttaaggctaaactgaaaggacaagttttggtgactgcgctcctccaagccagttacctcggttcaaagagttggtagctcagagaaccttcgaaaaaccgccctgcaaggcggttttttcgttttcagagcaagagattacgcgcagaccaaaacgatctcaagaagatcatcttattaagtctgacgctctattcaacaaagccgccgtccatgggtagggggcttcaaatcgtcctcgtgataccaattcggagcctgcttttttgtacaaacttgttgataatggcaattcaaggatcttcacctagatccttttaaattaaaaatgaagttttaaatcaatctaaagtatatatgagtaaacttggtctgacagttaccaatgcttaatcagtgaggcacctatctcagcgatctgtctatttcgttcatccatagttgcctgactccccgtcgtgtagataactacgatacgggagggcttaccatctggccccagtgctgcaatgataccgcgagagccacgctcaccggctccagatttatcagcaataaaccagccagccggaagggccgagcgcagaagtggtcctgcaactttatccgcctccatccagtctattaattgttgccgggaagctagagtaagtagttcgccagttaatagtttgcgcaacgttgttgccattgctacaggcatcgtggtgtcacgctcgtcgtttggtatggcttcattcagctccggttcccaacgatcaaggcgagttacatgatcccccatgttgtgcaaaaaagcggttagctccttcggtcctccgatcgttgtcagaagtaagttggccgcagtgttatcactcatggttatggcagcactgcataattctcttactgtcatgccatccgtaagatgcttttctgtgactggtgagtactcaaccaagtcattctgagaatagtgtatgcggcgaccgagttgctcttgcccggcgtcaatacgggataataccgcgccacatagcagaactttaaaagtgctcatcattggaaaacgttcttcggggcgaaaactctcaaggatcttaccgctgttgagatccagttcgatgtaacccactcgtgcacccaactgatcttcagcatcttttactttcaccagcgtttctgggtgagcaaaaacaggaaggcaaaatgccgcaaaaaagggaataagggcgacacggaaatgttgaatactcatactcttcctttttcaatattattgaagcatttatcagggttattgtctcatgagcggatacatatttgaatgtatttagaaaaataaacaaataggggttccgcgcacatttccccgaaaagtgccagatacctgaaacaaaacccatcgtacggccaaggaagtctccaataactgtgatccaccacaagcgccagggttttcccagtcacgacgttgtaaaacgacggccagtcatgcataatccgcacgcatctggaataaggaagtgccattccgcctgacctttgcctatgaggaccaaaacgaaaaaacaccctttcgggtgtcttttctggaatttggtaccgagaggctccatgattcagtatgacttgcctttggtcgaaaaaaaaagcccgcactgtcaggtgcgggcttttttctgtgtttccttattaggacccactttcacatttaagttgtttttctaatccgcatatgatcaattcaaggccgaataagaaggctggctctgcaccttggtgatcaaataattcgatagcttgtcgtaataatggcggcatactatcagtagtaggtgtttccctttcttctttagcgacttgatgctcttgatcttccaatacgcaacctaaagtaaaatgccccacagcgctgagtgcatataatgcattctctagtgaaaaaccttgttggcataaaaaggctaattgattttcgagagtttcatactgtttttctgtaggccgtgtacctaaatgtacttttgctccatcgcgatgacttagtaaagcacatctaaaacttttagcgttattacgtaaaaaatcttgccagctttccccttctaaagggcaaaagtgagtatggtgcctatctaacatctcaatggctaaggcgtcgagcaaagcccgcttattttttacatgccaatacaatgtaggctgctctacacctagcttctgggcgagtttacgggttgttaaaccttcgattccgacctcattaagcagctctaatgcgctgttaatcactttacttttatctaatctggacatattcaccaccctgaattgactctcttccgggcgctatcatgccataccgcgaaaggttttgcgccattcgatggcgcgccgccattgcttgtgcaatgtacatcagagattttgagacacaaccaattattgaaggcctccctaacggggggcctttttttgtttctggtcccccgcttaacgatcgttggctgttttcagcaggacgcactgacctccctatcagtgatagagattgacatccctatcagtgatagagatactgagcacagctgtcaccggatgtgctttccggtctgatgagtccgtgaggacgaaacagcctctacaaataattttgtttaaatcacacgggtaaggaggtatttaaatgaaaacactgtcccaagcacagtcgaagacgagtagccagcagttttctttcaccggtaattctagcgctaacgtgattatcggcaaccagaaactaactatcaacgacgtcgcccgcgttgctcggaacgggaccttagtaagcctgactaacaacactgatatacttcaaggcattcaggcgtcctgtgattatatcaataacgcagttgagtctggtgaaccaatttacggtgtgacctcaggcttcggcggtatggcgaacgttgctatcagccgtgaacaggcctccgaactgcaagagaatgtggtatggcacctgaaaactggtgctgggaacaaactccctttggcggacgtacgtgcagcaatgctgctgcgcgccaactcgcatatgcgtggcgcgtccggtatccgtctggagctgatcaaacgtatggaaatcttcttgaacgctggtgttactccgtacgtttatgaatttggatctatcggcgcttctggagatctggtcccgctgagctacattacgggttccctgattggccttgacccgagcttcaaggtggatttcaacggcaaagaaatggacgccccgaccgcgttacgccagttaaatctgtctcccctgacacttctgcctaaagaaggtctagctatgaataatgggacctcagtcatgactggcatcgcagctaactgcgtatacgacacccagatcctgactgcgattgcaatgggtgttcacgctctggatatccaggccctgaacggcaccaaccagtctttccacccgtttatccataactctaagccgcacccaggtcagctgtgggcggctgatcagatgatatcattgctggctaactcgcaactggtacgggacgagctggacggcaaacatgattaccgcgaccacgagctgatccaggatcgttatagcctgcgttgccttccgcagtacctgggtccgattgtggacggtatctcacagatagcaaaacaaatcgaaattgaaattaactccgttactgataaccctctgattgacgtcgataaccaggcgtcgtaccacggcggaaatttcctgggtcagtatgttggcatgggtatggaccaccttcgctactatatcggcctgctggcgaaacacctggatgtgcagattgcgctgctagctagtcccgaatttagcaacggactgccgccatctttattgggcaaccgtgaacgtaaggttaacatgggtctgaaaggtttacaaatctgtggcaattccatcatgccgctgctgacgttctacggcaatagcatcgccgaccgctttccgacccatgcagagcaattcaaccagaatatcaactctcagggctacacctccgcaacgctggcgcgacgtagtgttgatatcttccaaaactacgttgcgattgccctgatgtttggcgtccaggctgtagacctgaggacttataaaaagactggccattacgatgcgcgtgcttgcctctctccggctaccgaacgcctgtattccgccgtgcgtcacgtagttggtcagaaacctacttcagatcgcccatacatctggaacgataacgagcagggtctggatgaacacatcgctcgcatctccgctgacattgccgctggcggagtaattgttcaagctgtacaggatatcctgccgtgcctgcactaaccggcttatcggtcagtttcacctgatttacgtaaaaacccgcttcggcgggtttttgcttttggaggggcagaaagatgaatgactgtccacgacgctatacccaaaagaaa

SEQ ID NO: 245 - DNA, 5122 bp, synthetic construct
  source 1..5122: mol_type = other DNA
aggctaggtggaggctcagtgatgataagtctgcgatggtggatgcatgtgtcatggtcatagctgtttcctgtgtgaaattgttatccgctcagagggcacaatcctattccgcgctatccgacaatctccaagacattaggtggagttcagttcggcgagcggaaatggcttacgaacggggcggagatttcctggaagatgccaggaagatacttaacagggaagtgagagggccgcggcaaagccgtttttccataggctccgcccccctgacaagcatcacgaaatctgacgctcaaatcagtggtggcgaaacccgacaggactataaagataccaggcgtttccccctggcggctccctcgtgcgctctcctgttcctgcctttcggtttaccggtgtcattccgctgttatggccgcgtttgtctcattccacgcctgacactcagttccgggtaggcagttcgctccaagctggactgtatgcacgaaccccccgttcagtccgaccgctgcgccttatccggtaactatcgtcttgagtccaacccggaaagacatgcaaaagcaccactggcagcagccactggtaattgatttagaggagttagtcttgaagtcatgcgccggttaaggctaaactgaaaggacaagttttggtgactgcgctcctccaagccagttacctcggttcaaagagttggtagctcagagaaccttcgaaaaaccgccctgcaaggcggttttttcgttttcagagcaagagattacgcgcagaccaaaacgatctcaagaagatcatcttattaagtctgacgctctattcaacaaagccgccgtccatgggtagggggcttcaaatcgtcctcgtgataccaattcggagcctgcttttttgtacaaacttgttgataatggcaattcaaggatcttcacctagatccttttaaattaaaaatgaagttttaaatcaatctaaagtatatatgagtaaacttggtctgacagttaccaatgcttaatcagtgaggcacctatctcagcgatctgtctatttcgttcatccatagttgcctgactccccgtcgtgtagataactacgatacgggagggcttaccatctggccccagtgctgcaatgataccgcgagagccacgctcaccggctccagatttatcagcaataaaccagccagccggaagggccgagcgcagaagtggtcctgcaactttatccgcctccatccagtctattaattgttgccgggaagctagagtaagtagttcgccagttaatagtttgcgcaacgttgttgccattgctacaggcatcgtggtgtcacgctcgtcgtttggtatggcttcattcagctccggttcccaacgatcaaggcgagttacatgatcccccatgttgtgcaaaaaagcggttagctccttcggtcctccgatcgttgtcagaagtaagttggccgcagtgttatcactcatggttatggcagcactgcataattctcttactgtcatgccatccgtaagatgcttttctgtgactggtgagtactcaaccaagtcattctgagaatagtgtatgcggcgaccgagttgctcttgcccggcgtcaatacgggataataccgcgccacatagcagaactttaaaagtgctcatcattggaaaacgttcttcggggcgaaaactctcaaggatcttaccgctgttgagatccagttcgatgtaacccactcgtgcacccaactgatcttcagcatcttttactttcaccagcgtttctgggtgagcaaaaacaggaaggcaaaatgccgcaaaaaagggaataagggcgacacggaaatgttgaatactcatactcttcctttttcaatattattgaagcatttatcagggttattgtctcatgagcggatacatatttgaatgtatttagaaaaataaacaaataggggttccgcgcacatttccccgaaaagtgccagatacctgaaacaaaacccatcgtacggccaaggaagtctccaataactgtgatccaccacaagcgccagggttttcccagtcacgacgttgtaaaacgacggccagtcatgcataatccgcacgcatctggaataaggaagtgccattccgcctgacctttgcctatgaggaccaaaacgaaaaaacaccctttcgggtgtcttttctggaatttggtaccgagaggctccatgattcagtatgacttgcctttggtcgaaaaaaaaagcccgcactgtcaggtgcgggcttttttctgtgtttccttattaggacccactttcacatttaagttgtttttctaatccgcatatgatcaattcaaggccgaataagaaggctggctctgcaccttggtgatcaaataattcgatagcttgtcgtaataatggcggcatactatcagtagtaggtgtttccctttcttctttagcgacttgatgctcttgatcttccaatacgcaacctaaagtaaaatgccccacagcgctgagtgcatataatgcattctctagtgaaaaaccttgttggcataaaaaggctaattgattttcgagagtttcatactgtttttctgtaggccgtgtacctaaatgtacttttgctccatcgcgatgacttagtaaagcacatctaaaacttttagcgttattacgtaaaaaatcttgccagctttccccttctaaagggcaaaagtgagtatggtgcctatctaacatctcaatggctaaggcgtcgagcaaagcccgcttattttttacatgccaatacaatgtaggctgctctacacctagcttctgggcgagtttacgggttgttaaaccttcgattccgacctcattaagcagctctaatgcgctgttaatcactttacttttatctaatctggacatattcaccaccctgaattgactctcttccgggcgctatcatgccataccgcgaaaggttttgcgccattcgatggcgcgccgccattgcttgtgcaatgtacatcagagattttgagacacaaccaattattgaaggcctccctaacggggggcctttttttgtttctggtcccccgcttaacgatcgttggctgttttcagcaggacgcactgacctccctatcagtgatagagattgacatccctatcagtgatagagatactgagcacagctgtcaccggatgtgctttccggtctgatgagtccgtgaggacgaaacagcctctacaaataattttgtttaaatcacacgggtaaggaggtatttaaatgaaaacactgtcccaagcacagtcgaagacgagtagccagcagttttctttcaccggtaattctagcgctaacgtgattatcggcaaccagaaactaactatcaacgacgtcgcccgcgttgctcggaacgggaccttagtaagcctgactaacaacactgatatacttcaaggcattcaggcgtcctgtgattatatcaataacgcagttgagtctggtgaaccaatttacggtgtgacctcaggcttcggcggtatggcgaacgttgctatcagccgtgaacaggcctccgaactgcaacacaatttggtatggcatatgaaaactggtgctgggaacaaactccctttggcggacgtacgtgcagcaatgctgctgcgcgccaactcgcatatgcgtggcgcgtccggtatccgtctggagctgatcaaacgtatggaaatcttcttgaacgctggtgttactccgtacgtttatgaatttggatctatcggcgcttctggagatctggtcccgctgagctacattacgggttccctgattggccttgacccgagcttcaaggtggatttcaacggcaaagaaatggacgccccgaccgcgttacgccagttaaatctgtctcccctgacacttctgcctaaagaaggtattgctatgaccaatgggacctcagtcatgactggcatcgcagctaactgcgtatacgacacccagatcctgactgcgattgcaatgggtgttcacgctctggatatccaggccctgaacggcaccaaccagtctttccacccgtttatccataactctaagccgcacccaggtcagctgtgggcggctgatcagatgatatcattgctggctaactcgcaactggtacgggacgagctggacggcaaacatgattaccgcgaccacgagctgatccaggatcgttatagcctgcgttgccttccgcagtacctgggtccgattgtggacggtatctcacagatagcaaaacaaatcgaaattgaaattaactccgttactgataaccctctgattgacgtcgataaccaggcgtcgtaccacggcggaaatttcctgggtcagtatgttggcatgggtatggaccaccttcgctactatatcggcctgctggcgaaacacctggatgtgcagattgcgctgctagctagtcccgaatttagcaacggactgccgccatctttattgggcaaccgtgaacgtaaggttaacatgggtctgaaaggtttacaaatctgtggcaattccatcatgccgctgctgacgttctacggcaatagcatcgccgaccgctttccgacccatgcagagcaattcaaccagaatatcaactctcagggctacacctccgcaacgctggcgcgacgtagtgttgatatcttccaaaactacgttgcgattgccctgatgtttggcgtccaggctgtagacctgaggacttataaaaagactggccattacgatgcgcgtgcttgcctctctccggctaccgaacgcctgtattccgccgtgcgtcacgtagttggtcagaaacctacttcagatcgcccatacatctggaacgataacgagcagggtctggatgaacacatcgctcgcatctccgctgacattgccgctggcggagtaattgttcaagctgtacaggatatcctgccgtgcctgcactaaccggcttatcggtcagtttcacctgatttacgtaaaaacccgcttcggcgggtttttgcttttggaggggcagaaagatgaatgactgtccacgacgctatacccaaaagaaa

SEQ ID NO: 246 - DNA, 5122 bp, synthetic construct
  source 1..5122: mol_type = other DNA
aggctaggtggaggctcagtgatgataagtctgcgatggtggatgcatgtgtcatggtcatagctgtttcctgtgtgaaattgttatccgctcagagggcacaatcctattccgcgctatccgacaatctccaagacattaggtggagttcagttcggcgagcggaaatggcttacgaacggggcggagatttcctggaagatgccaggaagatacttaacagggaagtgagagggccgcggcaaagccgtttttccataggctccgcccccctgacaagcatcacgaaatctgacgctcaaatcagtggtggcgaaacccgacaggactataaagataccaggcgtttccccctggcggctccctcgtgcgctctcctgttcctgcctttcggtttaccggtgtcattccgctgttatggccgcgtttgtctcattccacgcctgacactcagttccgggtaggcagttcgctccaagctggactgtatgcacgaaccccccgttcagtccgaccgctgcgccttatccggtaactatcgtcttgagtccaacccggaaagacatgcaaaagcaccactggcagcagccactggtaattgatttagaggagttagtcttgaagtcatgcgccggttaaggctaaactgaaaggacaagttttggtgactgcgctcctccaagccagttacctcggttcaaagagttggtagctcagagaaccttcgaaaaaccgccctgcaaggcggttttttcgttttcagagcaagagattacgcgcagaccaaaacgatctcaagaagatcatcttattaagtctgacgctctattcaacaaagccgccgtccatgggtagggggcttcaaatcgtcctcgtgataccaattcggagcctgcttttttgtacaaacttgttgataatggcaattcaaggatcttcacctagatccttttaaattaaaaatgaagttttaaatcaatctaaagtatatatgagtaaacttggtctgacagttaccaatgcttaatcagtgaggcacctatctcagcgatctgtctatttcgttcatccatagttgcctgactccccgtcgtgtagataactacgatacgggagggcttaccatctggccccagtgctgcaatgataccgcgagagccacgctcaccggctccagatttatcagcaataaaccagccagccggaagggccgagcgcagaagtggtcctgcaactttatccgcctccatccagtctattaattgttgccgggaagctagagtaagtagttcgccagttaatagtttgcgcaacgttgttgccattgctacaggcatcgtggtgtcacgctcgtcgtttggtatggcttcattcagctccggttcccaacgatcaaggcgagttacatgatcccccatgttgtgcaaaaaagcggttagctccttcggtcctccgatcgttgtcagaagtaagttggccgcagtgttatcactcatggttatggcagcactgcataattctcttactgtcatgccatccgtaagatgcttttctgtgactggtgagtactcaaccaagtcattctgagaatagtgtatgcggcgaccgagttgctcttgcccggcgtcaatacgggataataccgcgccacatagcagaactttaaaagtgctcatcattggaaaacgttcttcggggcgaaaactctcaaggatcttaccgctgttgagatccagttcgatgtaacccactcgtgcacccaactgatcttcagcatcttttactttcaccagcgtttctgggtgagcaaaaacaggaaggcaaaatgccgcaaaaaagggaataagggcgacacggaaatgttgaatactcatactcttcctttttcaatattattgaagcatttatcagggttattgtctcatgagcggatacatatttgaatgtatttagaaaaataaacaaataggggttccgcgcacatttccccgaaaagtgccagatacctgaaacaaaacccatcgtacggccaaggaagtctccaataactgtgatccaccacaagcgccagggttttcccagtcacgacgttgtaaaacgacggccagtcatgcataatccgcacgcatctggaataaggaagtgccattccgcctgacctttgcctatgaggaccaaaacgaaaaaacaccctttcgggtgtcttttctggaatttggtaccgagaggctccatgattcagtatgacttgcctttggtcgaaaaaaaaagcccgcactgtcaggtgcgggcttttttctgtgtttccttattaggacccactttcacatttaagttgtttttctaatccgcatatgatcaattcaaggccgaataagaaggctggctctgcaccttggtgatcaaataattcgatagcttgtcgtaataatggcggcatactatcagtagtaggtgtttccctttcttctttagcgacttgatgctcttgatcttccaatacgcaacctaaagtaaaatgccccacagcgctgagtgcatataatgcattctctagtgaaaaaccttgttggcataaaaaggctaattgattttcgagagtttcatactgtttttctgtaggccgtgtacctaaatgtacttttgctccatcgcgatgacttagtaaagcacatctaaaacttttagcgttattacgtaaaaaatcttgccagctttccccttctaaagggcaaaagtgagtatggtgcctatctaacatctcaatggctaaggcgtcgagcaaagcccgcttattttttacatgccaatacaatgtaggctgctctacacctagcttctgggcgagtttacgggttgttaaaccttcgattccgacctcattaagcagctctaatgcgctgttaatcactttacttttatctaatctggacatattcaccaccctgaattgactctcttccgggcgctatcatgccataccgcgaaaggttttgcgccattcgatggcgcgccgccattgcttgtgcaatgtacatcagagattttgagacacaaccaattattgaaggcctccctaacggggggcctttttttgtttctggtcccccgcttaacgatcgttggctgttttcagcaggacgcactgacctccctatcagtgatagagattgacatccctatcagtgatagagatactgagcacagctgtcaccggatgtgctttccggtctgatgagtccgtgaggacgaaacagcctctacaaataattttgtttaaatcacacgggtaaggaggtatttaaatgaaaacactgtcccaagcacagtcgaagacgagtagccagcagttttctttcaccggtaattctagcgctaacgtgattatcggcaaccagaaactaactatcaacgacgtcgcccgcgttgctcggaacgggaccttagtaagcctgactaacaacactgatatacttcaaggcattcaggcgtcctgtgattatatcaataacgcagttgagtctggtgaaccaatttacggtgtgacctcaggcttcggcggtatggcgaacgttgctatcagccgtgaacaggcctccgaactgcaacataatgtcgtatggagtcagaaaactggtgctgggaacaaactccctttggcggacgtacgtgcagcaatgctgctgcgcgccaactcgcatatgcgtggcgcgtccggtatccgtctggagctgatcaaacgtatggaaatcttcttgaacgctggtgttactccgtacgtttatgaatttggatctatcggcgcttctggagatctggtcccgctgagctacattacgggttccctgattggccttgacccgagcttcaaggtggatttcaacggcaaagaaatggacgccccgaccgcgttacgccagttaaatctgtctcccctgacacttctgcctaaagaatcgctagctatgacgaatgggacctcagtcatgactggcatcgcagctaactgcgtatacgacacccagatcctgactgcgattgcaatgggtgttcacgctctggatatccaggccctgaacggcaccaaccagtctttccacccgtttatccataactctaagccgcacccaggtcagctgtgggcggctgatcagatgatatcattgctggctaactcgcaactggtacgggacgagctggacggcaaacatgattaccgcgaccacgagctgatccaggatcgttatagcctgcgttgccttccgcagtacctgggtccgattgtggacggtatctcacagatagcaaaacaaatcgaaattgaaattaactccgttactgataaccctctgattgacgtcgataaccaggcgtcgtaccacggcggaaatttcctgggtcagtatgttggcatgggtatggaccaccttcgctactatatcggcctgctggcgaaacacctggatgtgcagattgcgctgctagctagtcccgaatttagcaacggactgccgccatctttattgggcaaccgtgaacgtaaggttaacatgggtctgaaaggtttacaaatctgtggcaattccatcatgccgctgctgacgttctacggcaatagcatcgccgaccgctttccgacccatgcagagcaattcaaccagaatatcaactctcagggctacacctccgcaacgctggcgcgacgtagtgttgatatcttccaaaactacgttgcgattgccctgatgtttggcgtccaggctgtagacctgaggacttataaaaagactggccattacgatgcgcgtgcttgcctctctccggctaccgaacgcctgtattccgccgtgcgtcacgtagttggtcagaaacctacttcagatcgcccatacatctggaacgataacgagcagggtctggatgaacacatcgctcgcatctccgctgacattgccgctggcggagtaattgttcaagctgtacaggatatcctgccgtgcctgcactaaccggcttatcggtcagtttcacctgatttacgtaaaaacccgcttcggcgggtttttgcttttggaggggcagaaagatgaatgactgtccacgacgctatacccaaaagaaa

SEQ ID NO: 247 - DNA, 5122 bp, synthetic construct
  source 1..5122: mol_type = other DNA
aggctaggtggaggctcagtgatgataagtctgcgatggtggatgcatgtgtcatggtcatagctgtttcctgtgtgaaattgttatccgctcagagggcacaatcctattccgcgctatccgacaatctccaagacattaggtggagttcagttcggcgagcggaaatggcttacgaacggggcggagatttcctggaagatgccaggaagatacttaacagggaagtgagagggccgcggcaaagccgtttttccataggctccgcccccctgacaagcatcacgaaatctgacgctcaaatcagtggtggcgaaacccgacaggactataaagataccaggcgtttccccctggcggctccctcgtgcgctctcctgttcctgcctttcggtttaccggtgtcattccgctgttatggccgcgtttgtctcattccacgcctgacactcagttccgggtaggcagttcgctccaagctggactgtatgcacgaaccccccgttcagtccgaccgctgcgccttatccggtaactatcgtcttgagtccaacccggaaagacatgcaaaagcaccactggcagcagccactggtaattgatttagaggagttagtcttgaagtcatgcgccggttaaggctaaactgaaaggacaagttttggtgactgcgctcctccaagccagttacctcggttcaaagagttggtagctcagagaaccttcgaaaaaccgccctgcaaggcggttttttcgttttcagagcaagagattacgcgcagaccaaaacgatctcaagaagatcatcttattaagtctgacgctctattcaacaaagccgccgtccatgggtagggggcttcaaatcgtcctcgtgataccaattcggagcctgcttttttgtacaaacttgttgataatggcaattcaaggatcttcacctagatccttttaaattaaaaatgaagttttaaatcaatctaaagtatatatgagtaaacttggtctgacagttaccaatgcttaatcagtgaggcacctatctcagcgatctgtctatttcgttcatccatagttgcctgactccccgtcgtgtagataactacgatacgggagggcttaccatctggccccagtgctgcaatgataccgcgagagccacgctcaccggctccagatttatcagcaataaaccagccagccggaagggccgagcgcagaagtggtcctgcaactttatccgcctccatccagtctattaattgttgccgggaagctagagtaagtagttcgccagttaatagtttgcgcaacgttgttgccattgctacaggcatcgtggtgtcacgctcgtcgtttggtatggcttcattcagctccggttcccaacgatcaaggcgagttacatgatcccccatgttgtgcaaaaaagcggttagctccttcggtcctccgatcgttgtcagaagtaagttggccgcagtgttatcactcatggttatggcagcactgcataattctcttactgtcatgccatccgtaagatgcttttctgtgactggtgagtactcaaccaagtcattctgagaatagtgtatgcggcgaccgagttgctcttgcccggcgtcaatacgggataataccgcgccacatagcagaactttaaaagtgctcatcattggaaaacgttcttcggggcgaaaactctcaaggatcttaccgctgttgagatccagttcgatgtaacccactcgtgcacccaactgatcttcagcatcttttactttcaccagcgtttctgggtgagcaaaaacaggaaggcaaaatgccgcaaaaaagggaataagggcgacacggaaatgttgaatactcatactcttcctttttcaatattattgaagcatttatcagggttattgtctcatgagcggatacatatttgaatgtatttagaaaaataaacaaataggggttccgcgcacatttccccgaaaagtgccagatacctgaaacaaaacccatcgtacggccaaggaagtctccaataactgtgatccaccacaagcgccagggttttcccagtcacgacgttgtaaaacgacggccagtcatgcataatccgcacgcatctggaataaggaagtgccattccgcctgacctttgcctatgaggaccaaaacgaaaaaacaccctttcgggtgtcttttctggaatttggtaccgagaggctccatgattcagtatgacttgcctttggtcgaaaaaaaaagcccgcactgtcaggtgcgggcttttttctgtgtttccttattaggacccactttcacatttaagttgtttttctaatccgcatatgatcaattcaaggccgaataagaaggctggctctgcaccttggtgatcaaataattcgatagcttgtcgtaataatggcggcatactatcagtagtaggtgtttccctttcttctttagcgacttgatgctcttgatcttccaatacgcaacctaaagtaaaatgccccacagcgctgagtgcatataatgcattctctagtgaaaaaccttgttggcataaaaaggctaattgattttcgagagtttcatactgtttttctgtaggccgtgtacctaaatgtacttttgctccatcgcgatgacttagtaaagcacatctaaaacttttagcgttattacgtaaaaaatcttgccagctttccccttctaaagggcaaaagtgagtatggtgcctatctaacatctcaatggctaaggcgtcgagcaaagcccgcttattttttacatgccaatacaatgtaggctgctctacacctagcttctgggcgagtttacgggttgttaaaccttcgattccgacctcattaagcagctctaatgcgctgttaatcactttacttttatctaatctggacatattcaccaccctgaattgactctcttccgggcgctatcatgccataccgcgaaaggttttgcgccattcgatggcgcgccgccattgcttgtgcaatgtacatcagagattttgagacacaaccaattattgaaggcctccctaacggggggcctttttttgtttctggtcccccgcttaacgatcgttggctgttttcagcaggacgcactgacctccctatcagtgatagagattgacatccctatcagtgatagagatactgagcacagctgtcaccggatgtgctttccggtctgatgagtccgtgaggacgaaacagcctctacaaataattttgtttaaatcacacgggtaaggaggtatttaaatgaaaacactgtcccaagcacagtcgaagacgagtagccagcagttttctttcaccggtaattctagcgctaacgtgattatcggcaaccagaaactaactatcaacgacgtcgcccgcgttgctcggaacgggaccttagtaagcctgactaacaacactgatatacttcaaggcattcaggcgtcctgtgattatatcaataacgcagttgagtctggtgaaccaatttacggtgtgacctcaggcttcggcggtatggcgaacgttgctatcagccgtgaacaggcctccgaactgcaagagaatatggtatggagtatgaaaactggtgctgggaacaaactccctttggcggacgtacgtgcagcaatgctgctgcgcgccaactcgcatatgcgtggcgcgtccggtatccgtctggagctgatcaaacgtatggaaatcttcttgaacgctggtgttactccgtacgtttatgaatttggatctatcggcgcttctggagatctggtcccgctgagctacattacgggttccctgattggccttgacccgagcttcaaggtggatttcaacggcaaagaaatggacgccccgaccgcgttacgccagttaaatctgtctcccctgacacttctgcctaaagaagcgattgctatgatgaatgggacctcagtcatgactggcatcgcagctaactgcgtatacgacacccagatcctgactgcgattgcaatgggtgttcacgctctggatatccaggccctgaacggcaccaaccagtctttccacccgtttatccataactctaagccgcacccaggtcagctgtgggcggctgatcagatgatatcattgctggctaactcgcaactggtacgggacgagctggacggcaaacatgattaccgcgaccacgagctgatccaggatcgttatagcctgcgttgccttccgcagtacctgggtccgattgtggacggtatctcacagatagcaaaacaaatcgaaattgaaattaactccgttactgataaccctctgattgacgtcgataaccaggcgtcgtaccacggcggaaatttcctgggtcagtatgttggcatgggtatggaccaccttcgctactatatcggcctgctggcgaaacacctggatgtgcagattgcgctgctagctagtcccgaatttagcaacggactgccgccatctttattgggcaaccgtgaacgtaaggttaacatgggtctgaaaggtttacaaatctgtggcaattccatcatgccgctgctgacgttctacggcaatagcatcgccgaccgctttccgacccatgcagagcaattcaaccagaatatcaactctcagggctacacctccgcaacgctggcgcgacgtagtgttgatatcttccaaaactacgttgcgattgccctgatgtttggcgtccaggctgtagacctgaggacttataaaaagactggccattacgatgcgcgtgcttgcctctctccggctaccgaacgcctgtattccgccgtgcgtcacgtagttggtcagaaacctacttcagatcgcccatacatctggaacgataacgagcagggtctggatgaacacatcgctcgcatctccgctgacattgccgctggcggagtaattgttcaagctgtacaggatatcctgccgtgcctgcactaaccggcttatcggtcagtttcacctgatttacgtaaaaacccgcttcggcgggtttttgcttttggaggggcagaaagatgaatgactgtccacgacgctatacccaaaagaaa

SEQ ID NO: 248 - DNA, 5122 bp, synthetic construct
  source 1..5122: mol_type = other DNA
aggctaggtggaggctcagtgatgataagtctgcgatggtggatgcatgtgtcatggtcatagctgtttcctgtgtgaaattgttatccgctcagagggcacaatcctattccgcgctatccgacaatctccaagacattaggtggagttcagttcggcgagcggaaatggcttacgaacggggcggagatttcctggaagatgccaggaagatacttaacagggaagtgagagggccgcggcaaagccgtttttccataggctccgcccccctgacaagcatcacgaaatctgacgctcaaatcagtggtggcgaaacccgacaggactataaagataccaggcgtttccccctggcggctccctcgtgcgctctcctgttcctgcctttcggtttaccggtgtcattccgctgttatggccgcgtttgtctcattccacgcctgacactcagttccgggtaggcagttcgctccaagctggactgtatgcacgaaccccccgttcagtccgaccgctgcgccttatccggtaactatcgtcttgagtccaacccggaaagacatgcaaaagcaccactggcagcagccactggtaattgatttagaggagttagtcttgaagtcatgcgccggttaaggctaaactgaaaggacaagttttggtgactgcgctcctccaagccagttacctcggttcaaagagttggtagctcagagaaccttcgaaaaaccgccctgcaaggcggttttttcgttttcagagcaagagattacgcgcagaccaaaacgatctcaagaagatcatcttattaagtctgacgctctattcaacaaagccgccgtccatgggtagggggcttcaaatcgtcctcgtgataccaattcggagcctgcttttttgtacaaacttgttgataatggcaattcaaggatcttcacctagatccttttaaattaaaaatgaagttttaaatcaatctaaagtatatatgagtaaacttggtctgacagttaccaatgcttaatcagtgaggcacctatctcagcgatctgtctatttcgttcatccatagttgcctgactccccgtcgtgtagataactacgatacgggagggcttaccatctggccccagtgctgcaatgataccgcgagagccacgctcaccggctccagatttatcagcaataaaccagccagccggaagggccgagcgcagaagtggtcctgcaactttatccgcctccatccagtctattaattgttgccgggaagctagagtaagtagttcgccagttaatagtttgcgcaacgttgttgccattgctacaggcatcgtggtgtcacgctcgtcgtttggtatggcttcattcagctccggttcccaacgatcaaggcgagttacatgatcccccatgttgtgcaaaaaagcggttagctccttcggtcctccgatcgttgtcagaagtaagttggccgcagtgttatcactcatggttatggcagcactgcataattctcttactgtcatgccatccgtaagatgcttttctgtgactggtgagtactcaaccaagtcattctgagaatagtgtatgcggcgaccgagttgctcttgcccggcgtcaatacgggataataccgcgccacatagcagaactttaaaagtgctcatcattggaaaacgttcttcggggcgaaaactctcaaggatcttaccgctgttgagatccagttcgatgtaacccactcgtgcacccaactgatcttcagcatcttttactttcaccagcgtttctgggtgagcaaaaacaggaaggcaaaatgccgcaaaaaagggaataagggcgacacggaaatgttgaatactcatactcttcctttttcaatattattgaagcatttatcagggttattgtctcatgagcggatacatatttgaatgtatttagaaaaataaacaaataggggttccgcgcacatttccccgaaaagtgccagatacctgaaacaaaacccatcgtacggccaaggaagtctccaataactgtgatccaccacaagcgccagggttttcccagtcacgacgttgtaaaacgacggccagtcatgcataatccgcacgcatctggaataaggaagtgccattccgcctgacctttgcctatgaggaccaaaacgaaaaaacaccctttcgggtgtcttttctggaatttggtaccgagaggctccatgattcagtatgacttgcctttggtcgaaaaaaaaagcccgcactgtcaggtgcgggcttttttctgtgtttccttattaggacccactttcacatttaagttgtttttctaatccgcatatgatcaattcaaggccgaataagaaggctggctctgcaccttggtgatcaaataattcgatagcttgtcgtaataatggcggcatactatcagtagtaggtgtttccctttcttctttagcgacttgatgctcttgatcttccaatacgcaacctaaagtaaaatgccccacagcgctgagtgcatataatgcattctctagtgaaaaaccttgttggcataaaaaggctaattgattttcgagagtttcatactgtttttctgtaggccgtgtacctaaatgtacttttgctccatcgcgatgacttagtaaagcacatctaaaacttttagcgttattacgtaaaaaatcttgccagctttccccttctaaagggcaaaagtgagtatggtgcctatctaacatctcaatggctaaggcgtcgagcaaagcccgcttattttttacatgccaatacaatgtaggctgctctacacctagcttctgggcgagtttacgggttgttaaaccttcgattccgacctcattaagcagctctaatgcgctgttaatcactttacttttatctaatctggacatattcaccaccctgaattgactctcttccgggcgctatcatgccataccgcgaaaggttttgcgccattcgatggcgcgccgccattgcttgtgcaatgtacatcagagattttgagacacaaccaattattgaaggcctccctaacggggggcctttttttgtttctggtcccccgcttaacgatcgttggctgttttcagcaggacgcactgacctccctatcagtgatagagattgacatccctatcagtgatagagatactgagcacagctgtcaccggatgtgctttccggtctgatgagtccgtgaggacgaaacagcctctacaaataattttgtttaaatcacacgggtaaggaggtatttaaatgaaaacactgtcccaagcacagtcgaagacgagtagccagcagttttctttcaccggtaattctagcgctaacgtgattatcggcaaccagaaactaactatcaacgacgtcgcccgcgttgctcggaacgggaccttagtaagcctgactaacaacactgatatacttcaaggcattcaggcgtcctgtgattatatcaataacgcagttgagtctggtgaaccaatttacggtgtgacctcaggcttcggcggtatggcgaacgttgctatcagccgtgaacaggcctccgaactgcaagagaatgtcgtatggtatatgaaaactggtgctgggaacaaactccctttggcggacgtacgtgcagcaatgctgctgcgcgccaactcgcatatgcgtggcgcgtccggtatccgtctggagctgatcaaacgtatggaaatcttcttgaacgctggtgttactccgtacgtttatgaatttggatctatcggcgcttctggagatctggtcccgctgagctacattacgggttccctgattggccttgacccgagcttcaaggtggatttcaacggcaaagaaatggacgccccgaccgcgttacgccagttaaatctgtctcccctgacacttctgcctaaagaaggtattgctatgatgaatgggacctcagtcatgactggcatcgcagctaactgcgtatacgacacccagatcctgactgcgattgcaatgggtgttcacgctctggatatccaggccctgaacggcaccaaccagtctttccacccgtttatccataactctaagccgcacccaggtcagctgtgggcggctgatcagatgatatcattgctggctaactcgcaactggtacgggacgagctggacggcaaacatgattaccgcgaccacgagctgatccaggatcgttatagcctgcgttgccttccgcagtacctgggtccgattgtggacggtatctcacagatagcaaaacaaatcgaaattgaaattaactccgttactgataaccctctgattgacgtcgataaccaggcgtcgtaccacggcggaaatttcctgggtcagtatgttggcatgggtatggaccaccttcgctactatatcggcctgctggcgaaacacctggatgtgcagattgcgctgctagctagtcccgaatttagcaacggactgccgccatctttattgggcaaccgtgaacgtaaggttaacatgggtctgaaaggtttacaaatctgtggcaattccatcatgccgctgctgacgttctacggcaatagcatcgccgaccgctttccgacccatgcagagcaattcaaccagaatatcaactctcagggctacacctccgcaacgctggcgcgacgtagtgttgatatcttccaaaactacgttgcgattgccctgatgtttggcgtccaggctgtagacctgaggacttataaaaagactggccattacgatgcgcgtgcttgcctctctccggctaccgaacgcctgtattccgccgtgcgtcacgtagttggtcagaaacctacttcagatcgcccatacatctggaacgataacgagcagggtctggatgaacacatcgctcgcatctccgctgacattgccgctggcggagtaattgttcaagctgtacaggatatcctgccgtgcctgcactaaccggcttatcggtcagtttcacctgatttacgtaaaaacccgcttcggcgggtttttgcttttggaggggcagaaagatgaatgactgtccacgacgctatacccaaaagaaa

SEQ ID NO: 249 - DNA, 5122 bp, synthetic construct
  source 1..5122: mol_type = other DNA
aggctaggtggaggctcagtgatgataagtctgcgatggtggatgcatgtgtcatggtcatagctgtttcctgtgtgaaattgttatccgctcagagggcacaatcctattccgcgctatccgacaatctccaagacattaggtggagttcagttcggcgagcggaaatggcttacgaacggggcggagatttcctggaagatgccaggaagatacttaacagggaagtgagagggccgcggcaaagccgtttttccataggctccgcccccctgacaagcatcacgaaatctgacgctcaaatcagtggtggcgaaacccgacaggactataaagataccaggcgtttccccctggcggctccctcgtgcgctctcctgttcctgcctttcggtttaccggtgtcattccgctgttatggccgcgtttgtctcattccacgcctgacactcagttccgggtaggcagttcgctccaagctggactgtatgcacgaaccccccgttcagtccgaccgctgcgccttatccggtaactatcgtcttgagtccaacccggaaagacatgcaaaagcaccactggcagcagccactggtaattgatttagaggagttagtcttgaagtcatgcgccggttaaggctaaactgaaaggacaagttttggtgactgcgctcctccaagccagttacctcggttcaaagagttggtagctcagagaaccttcgaaaaaccgccctgcaaggcggttttttcgttttcagagcaagagattacgcgcagaccaaaacgatctcaagaagatcatcttattaagtctgacgctctattcaacaaagccgccgtccatgggtagggggcttcaaatcgtcctcgtgataccaattcggagcctgcttttttgtacaaacttgttgataatggcaattcaaggatcttcacctagatccttttaaattaaaaatgaagttttaaatcaatctaaagtatatatgagtaaacttggtctgacagttaccaatgcttaatcagtgaggcacctatctcagcgatctgtctatttcgttcatccatagttgcctgactccccgtcgtgtagataactacgatacgggagggcttaccatctggccccagtgctgcaatgataccgcgagagccacgctcaccggctccagatttatcagcaataaaccagccagccggaagggccgagcgcagaagtggtcctgcaactttatccgcctccatccagtctattaattgttgccgggaagctagagtaagtagttcgccagttaatagtttgcgcaacgttgttgccattgctacaggcatcgtggtgtcacgctcgtcgtttggtatggcttcattcagctccggttcccaacgatcaaggcgagttacatgatcccccatgttgtgcaaaaaagcggttagctccttcggtcctccgatcgttgtcagaagtaagttggccgcagtgttatcactcatggttatggcagcactgcataattctcttactgtcatgccatccgtaagatgcttttctgtgactggtgagtactcaaccaagtcattctgagaatagtgtatgcggcgaccgagttgctcttgcccggcgtcaatacgggataataccgcgccacatagcagaactttaaaagtgctcatcattggaaaacgttcttcggggcgaaaactctcaaggatcttaccgctgttgagatccagttcgatgtaacccactcgtgcacccaactgatcttcagcatcttttactttcaccagcgtttctgggtgagcaaaaacaggaaggcaaaatgccgcaaaaaagggaataagggcgacacggaaatgttgaatactcatactcttcctttttcaatattattgaagcatttatcagggttattgtctcatgagcggatacatatttgaatgtatttagaaaaataaacaaataggggttccgcgcacatttccccgaaaagtgccagatacctgaaacaaaacccatcgtacggccaaggaagtctccaataactgtgatccaccacaagcgccagggttttcccagtcacgacgttgtaaaacgacggccagtcatgcataatccgcacgcatctggaataaggaagtgccattccgcctgacctttgcctatgaggaccaaaacgaaaaaacaccctttcgggtgtcttttctggaatttggtaccgagaggctccatgattcagtatgacttgcctttggtcgaaaaaaaaagcccgcactgtcaggtgcgggcttttttctgtgtttccttattaggacccactttcacatttaagttgtttttctaatccgcatatgatcaattcaaggccgaataagaaggctggctctgcaccttggtgatcaaataattcgatagcttgtcgtaataatggcggcatactatcagtagtaggtgtttccctttcttctttagcgacttgatgctcttgatcttccaatacgcaacctaaagtaaaatgccccacagcgctgagtgcatataatgcattctctagtgaaaaaccttgttggcataaaaaggctaattgattttcgagagtttcatactgtttttctgtaggccgtgtacctaaatgtacttttgctccatcgcgatgacttagtaaagcacatctaaaacttttagcgttattacgtaaaaaatcttgccagctttccccttctaaagggcaaaagtgagtatggtgcctatctaacatctcaatggctaaggcgtcgagcaaagcccgcttattttttacatgccaatacaatgtaggctgctctacacctagcttctgggcgagtttacgggttgttaaaccttcgattccgacctcattaagcagctctaatgcgctgttaatcactttacttttatctaatctggacatattcaccaccctgaattgactctcttccgggcgctatcatgccataccgcgaaaggttttgcgccattcgatggcgcgccgccattgcttgtgcaatgtacatcagagattttgagacacaaccaattattgaaggcctccctaacggggggcctttttttgtttctggtcccccgcttaacgatcgttggctgttttcagcaggacgcactgacctccctatcagtgatagagattgacatccctatcagtgatagagatactgagcacagctgtcaccggatgtgctttccggtctgatgagtccgtgaggacgaaacagcctctacaaataattttgtttaaatcacacgggtaaggaggtatttaaatgaaaacactgtcccaagcacagtcgaagacgagtagccagcagttttctttcaccggtaattctagcgctaacgtgattatcggcaaccagaaactaactatcaacgacgtcgcccgcgttgctcggaacgggaccttagtaagcctgactaacaacactgatatacttcaaggcattcaggcgtcctgtgattatatcaataacgcagttgagtctggtgaaccaatttacggtgtgacctcaggcttcggcggtatggcgaacgttgctatcagccgtgaacaggcctccgaactgcaaaagaatttggtatggtatgtgaaaactggtgctgggaacaaactccctttggcggacgtacgtgcagcaatgctgctgcgcgccaactcgcatatgcgtggcgcgtccggtatccgtctggagctgatcaaacgtatggaaatcttcttgaacgctggtgttactccgtacgtttatgaatttggatctatcggcgcttctggagatctggtcccgctgagctacattacgggttccctgattggccttgacccgagcttcaaggtggatttcaacggcaaagaaatggacgccccgaccgcgttacgccagttaaatctgtctcccctgacacttctgcctaaagaaggtattgctatggtgaatgggacctcagtcatgactggcatcgcagctaactgcgtatacgacacccagatcctgactgcgattgcaatgggtgttcacgctctggatatccaggccctgaacggcaccaaccagtctttccacccgtttatccataactctaagccgcacccaggtcagctgtgggcggctgatcagatgatatcattgctggctaactcgcaactggtacgggacgagctggacggcaaacatgattaccgcgaccacgagctgatccaggatcgttatagcctgcgttgccttccgcagtacctgggtccgattgtggacggtatctcacagatagcaaaacaaatcgaaattgaaattaactccgttactgataaccctctgattgacgtcgataaccaggcgtcgtaccacggcggaaatttcctgggtcagtatgttggcatgggtatggaccaccttcgctactatatcggcctgctggcgaaacacctggatgtgcagattgcgctgctagctagtcccgaatttagcaacggactgccgccatctttattgggcaaccgtgaacgtaaggttaacatgggtctgaaaggtttacaaatctgtggcaattccatcatgccgctgctgacgttctacggcaatagcatcgccgaccgctttccgacccatgcagagcaattcaaccagaatatcaactctcagggctacacctccgcaacgctggcgcgacgtagtgttgatatcttccaaaactacgttgcgattgccctgatgtttggcgtccaggctgtagacctgaggacttataaaaagactggccattacgatgcgcgtgcttgcctctctccggctaccgaacgcctgtattccgccgtgcgtcacgtagttggtcagaaacctacttcagatcgcccatacatctggaacgataacgagcagggtctggatgaacacatcgctcgcatctccgctgacattgccgctggcggagtaattgttcaagctgtacaggatatcctgccgtgcctgcactaaccggcttatcggtcagtttcacctgatttacgtaaaaacccgcttcggcgggtttttgcttttggaggggcagaaagatgaatgactgtccacgacgctatacccaaaagaaa

SEQ ID NO: 250 - DNA, 5122 bp, synthetic construct
  source 1..5122: mol_type = other DNA
aggctaggtggaggctcagtgatgataagtctgcgatggtggatgcatgtgtcatggtcatagctgtttcctgtgtgaaattgttatccgctcagagggcacaatcctattccgcgctatccgacaatctccaagacattaggtggagttcagttcggcgagcggaaatggcttacgaacggggcggagatttcctggaagatgccaggaagatacttaacagggaagtgagagggccgcggcaaagccgtttttccataggctccgcccccctgacaagcatcacgaaatctgacgctcaaatcagtggtggcgaaacccgacaggactataaagataccaggcgtttccccctggcggctccctcgtgcgctctcctgttcctgcctttcggtttaccggtgtcattccgctgttatggccgcgtttgtctcattccacgcctgacactcagttccgggtaggcagttcgctccaagctggactgtatgcacgaaccccccgttcagtccgaccgctgcgccttatccggtaactatcgtcttgagtccaacccggaaagacatgcaaaagcaccactggcagcagccactggtaattgatttagaggagttagtcttgaagtcatgcgccggttaaggctaaactgaaaggacaagttttggtgactgcgctcctccaagccagttacctcggttcaaagagttggtagctcagagaaccttcgaaaaaccgccctgcaaggcggttttttcgttttcagagcaagagattacgcgcagaccaaaacgatctcaagaagatcatcttattaagtctgacgctctattcaacaaagccgccgtccatgggtagggggcttcaaatcgtcctcgtgataccaattcggagcctgcttttttgtacaaacttgttgataatggcaattcaaggatcttcacctagatccttttaaattaaaaatgaagttttaaatcaatctaaagtatatatgagtaaacttggtctgacagttaccaatgcttaatcagtgaggcacctatctcagcgatctgtctatttcgttcatccatagttgcctgactccccgtcgtgtagataactacgatacgggagggcttaccatctggccccagtgctgcaatgataccgcgagagccacgctcaccggctccagatttatcagcaataaaccagccagccggaagggccgagcgcagaagtggtcctgcaactttatccgcctccatccagtctattaattgttgccgggaagctagagtaagtagttcgccagttaatagtttgcgcaacgttgttgccattgctacaggcatcgtggtgtcacgctcgtcgtttggtatggcttcattcagctccggttcccaacgatcaaggcgagttacatgatcccccatgttgtgcaaaaaagcggttagctccttcggtcctccgatcgttgtcagaagtaagttggccgcagtgttatcactcatggttatggcagcactgcataattctcttactgtcatgccatccgtaagatgcttttctgtgactggtgagtactcaaccaagtcattctgagaatagtgtatgcggcgaccgagttgctcttgcccggcgtcaatacgggataataccgcgccacatagcagaactttaaaagtgctcatcattggaaaacgttcttcggggcgaaaactctcaaggatcttaccgctgttgagatccagttcgatgtaacccactcgtgcacccaactgatcttcagcatcttttactttcaccagcgtttctgggtgagcaaaaacaggaaggcaaaatgccgcaaaaaagggaataagggcgacacggaaatgttgaatactcatactcttcctttttcaatattattgaagcatttatcagggttattgtctcatgagcggatacatatttgaatgtatttagaaaaataaacaaataggggttccgcgcacatttccccgaaaagtgccagatacctgaaacaaaacccatcgtacggccaaggaagtctccaataactgtgatccaccacaagcgccagggttttcccagtcacgacgttgtaaaacgacggccagtcatgcataatccgcacgcatctggaataaggaagtgccattccgcctgacctttgcctatgaggaccaaaacgaaaaaacaccctttcgggtgtcttttctggaatttggtaccgagaggctccatgattcagtatgacttgcctttggtcgaaaaaaaaagcccgcactgtcaggtgcgggcttttttctgtgtttccttattaggacccactttcacatttaagttgtttttctaatccgcatatgatcaattcaaggccgaataagaaggctggctctgcaccttggtgatcaaataattcgatagcttgtcgtaataatggcggcatactatcagtagtaggtgtttccctttcttctttagcgacttgatgctcttgatcttccaatacgcaacctaaagtaaaatgccccacagcgctgagtgcatataatgcattctctagtgaaaaaccttgttggcataaaaaggctaattgattttcgagagtttcatactgtttttctgtaggccgtgtacctaaatgtacttttgctccatcgcgatgacttagtaaagcacatctaaaacttttagcgttattacgtaaaaaatcttgccagctttccccttctaaagggcaaaagtgagtatggtgcctatctaacatctcaatggctaaggcgtcgagcaaagcccgcttattttttacatgccaatacaatgtaggctgctctacacctagcttctgggcgagtttacgggttgttaaaccttcgattccgacctcattaagcagctctaatgcgctgttaatcactttacttttatctaatctggacatattcaccaccctgaattgactctcttccgggcgctatcatgccataccgcgaaaggttttgcgccattcgatggcgcgccgccattgcttgtgcaatgtacatcagagattttgagacacaaccaattattgaaggcctccctaacggggggcctttttttgtttctggtcccccgcttaacgatcgttggctgttttcagcaggacgcactgacctccctatcagtgatagagattgacatccctatcagtgatagagatactgagcacagctgtcaccggatgtgctttccggtctgatgagtccgtgaggacgaaacagcctctacaaataattttgtttaaatcacacgggtaaggaggtatttaaatgaaaacactgtcccaagcacagtcgaagacgagtagccagcagttttctttcaccggtaattctagcgctaacgtgattatcggcaaccagaaactaactatcaacgacgtcgcccgcgttgctcggaacgggaccttagtaagcctgactaacaacactgatatacttcaaggcattcaggcgtcctgtgattatatcaataacgcagttgagtctggtgaaccaatttacggtgtgacctcaggcttcggcggtatggcgaacgttgctatcagccgtgaacaggcctccgaactgcaagagaatatggtatggcacctgaaaactggtgctgggaacaaactccctttggcggacgtacgtgcagcaatgctgctgcgcgccaactcgcatatgcgtggcgcgtccggtatccgtctggagctgatcaaacgtatggaaatcttcttgaacgctggtgttactccgtacgtttatgaatttggatctatcggcgcttctggagatctggtcccgctgagctacattacgggttccctgattggccttgacccgagcttcaaggtggatttcaacggcaaagaaatggacgccccgaccgcgttacgccagttaaatctgtctcccctgacacttctgcctaaagaagcgattgctatgctcaatgggacctcagtcatgactggcatcgcagctaactgcgtatacgacacccagatcctgactgcgattgcaatgggtgttcacgctctggatatccaggccctgaacggcaccaaccagtctttccacccgtttatccataactctaagccgcacccaggtcagctgtgggcggctgatcagatgatatcattgctggctaactcgcaactggtacgggacgagctggacggcaaacatgattaccgcgaccacgagctgatccaggatcgttatagcctgcgttgccttccgcagtacctgggtccgattgtggacggtatctcacagatagcaaaacaaatcgaaattgaaattaactccgttactgataaccctctgattgacgtcgataaccaggcgtcgtaccacggcggaaatttcctgggtcagtatgttggcatgggtatggaccaccttcgctactatatcggcctgctggcgaaacacctggatgtgcagattgcgctgctagctagtcccgaatttagcaacggactgccgccatctttattgggcaaccgtgaacgtaaggttaacatgggtctgaaaggtttacaaatctgtggcaattccatcatgccgctgctgacgttctacggcaatagcatcgccgaccgctttccgacccatgcagagcaattcaaccagaatatcaactctcagggctacacctccgcaacgctggcgcgacgtagtgttgatatcttccaaaactacgttgcgattgccctgatgtttggcgtccaggctgtagacctgaggacttataaaaagactggccattacgatgcgcgtgcttgcctctctccggctaccgaacgcctgtattccgccgtgcgtcacgtagttggtcagaaacctacttcagatcgcccatacatctggaacgataacgagcagggtctggatgaacacatcgctcgcatctccgctgacattgccgctggcggagtaattgttcaagctgtacaggatatcctgccgtgcctgcactaaccggcttatcggtcagtttcacctgatttacgtaaaaacccgcttcggcgggtttttgcttttggaggggcagaaagatgaatgactgtccacgacgctatacccaaaagaaa

SEQ ID NO: 251 - DNA, 5122 bp, synthetic construct
  source 1..5122: mol_type = other DNA
aggctaggtggaggctcagtgatgataagtctgcgatggtggatgcatgtgtcatggtcatagctgtttcctgtgtgaaattgttatccgctcagagggcacaatcctattccgcgctatccgacaatctccaagacattaggtggagttcagttcggcgagcggaaatggcttacgaacggggcggagatttcctggaagatgccaggaagatacttaacagggaagtgagagggccgcggcaaagccgtttttccataggctccgcccccctgacaagcatcacgaaatctgacgctcaaatcagtggtggcgaaacccgacaggactataaagataccaggcgtttccccctggcggctccctcgtgcgctctcctgttcctgcctttcggtttaccggtgtcattccgctgttatggccgcgtttgtctcattccacgcctgacactcagttccgggtaggcagttcgctccaagctggactgtatgcacgaaccccccgttcagtccgaccgctgcgccttatccggtaactatcgtcttgagtccaacccggaaagacatgcaaaagcaccactggcagcagccactggtaattgatttagaggagttagtcttgaagtcatgcgccggttaaggctaaactgaaaggacaagttttggtgactgcgctcctccaagccagttacctcggttcaaagagttggtagctcagagaaccttcgaaaaaccgccctgcaaggcggttttttcgttttcagagcaagagattacgcgcagaccaaaacgatctcaagaagatcatcttattaagtctgacgctctattcaacaaagccgccgtccatgggtagggggcttcaaatcgtcctcgtgataccaattcggagcctgcttttttgtacaaacttgttgataatggcaattcaaggatcttcacctagatccttttaaattaaaaatgaagttttaaatcaatctaaagtatatatgagtaaacttggtctgacagttaccaatgcttaatcagtgaggcacctatctcagcgatctgtctatttcgttcatccatagttgcctgactccccgtcgtgtagataactacgatacgggagggcttaccatctggccccagtgctgcaatgataccgcgagagccacgctcaccggctccagatttatcagcaataaaccagccagccggaagggccgagcgcagaagtggtcctgcaactttatccgcctccatccagtctattaattgttgccgggaagctagagtaagtagttcgccagttaatagtttgcgcaacgttgttgccattgctacaggcatcgtggtgtcacgctcgtcgtttggtatggcttcattcagctccggttcccaacgatcaaggcgagttacatgatcccccatgttgtgcaaaaaagcggttagctccttcggtcctccgatcgttgtcagaagtaagttggccgcagtgttatcactcatggttatggcagcactgcataattctcttactgtcatgccatccgtaagatgcttttctgtgactggtgagtactcaaccaagtcattctgagaatagtgtatgcggcgaccgagttgctcttgcccggcgtcaatacgggataataccgcgccacatagcagaactttaaaagtgctcatcattggaaaacgttcttcggggcgaaaactctcaaggatcttaccgctgttgagatccagttcgatgtaacccactcgtgcacccaactgatcttcagcatcttttactttcaccagcgtttctgggtgagcaaaaacaggaaggcaaaatgccgcaaaaaagggaataagggcgacacggaaatgttgaatactcatactcttcctttttcaatattattgaagcatttatcagggttattgtctcatgagcggatacatatttgaatgtatttagaaaaataaacaaataggggttccgcgcacatttccccgaaaagtgccagatacctgaaacaaaacccatcgtacggccaaggaagtctccaataactgtgatccaccacaagcgccagggttttcccagtcacgacgttgtaaaacgacggccagtcatgcataatccgcacgcatctggaataaggaagtgccattccgcctgacctttgcctatgaggaccaaaacgaaaaaacaccctttcgggtgtcttttctggaatttggtaccgagaggctccatgattcagtatgacttgcctttggtcgaaaaaaaaagcccgcactgtcaggtgcgggcttttttctgtgtttccttattaggacccactttcacatttaagttgtttttctaatccgcatatgatcaattcaaggccgaataagaaggctggctctgcaccttggtgatcaaataattcgatagcttgtcgtaataatggcggcatactatcagtagtaggtgtttccctttcttctttagcgacttgatgctcttgatcttccaatacgcaacctaaagtaaaatgccccacagcgctgagtgcatataatgcattctctagtgaaaaaccttgttggcataaaaaggctaattgattttcgagagtttcatactgtttttctgtaggccgtgtacctaaatgtacttttgctccatcgcgatgacttagtaaagcacatctaaaacttttagcgttattacgtaaaaaatcttgccagctttccccttctaaagggcaaaagtgagtatggtgcctatctaacatctcaatggctaaggcgtcgagcaaagcccgcttattttttacatgccaatacaatgtaggctgctctacacctagcttctgggcgagtttacgggttgttaaaccttcgattccgacctcattaagcagctctaatgcgctgttaatcactttacttttatctaatctggacatattcaccaccctgaattgactctcttccgggcgctatcatgccataccgcgaaaggttttgcgccattcgatggcgcgccgccattgcttgtgcaatgtacatcagagattttgagacacaaccaattattgaaggcctccctaacggggggcctttttttgtttctggtcccccgcttaacgatcgttggctgttttcagcaggacgcactgacctccctatcagtgatagagattgacatccctatcagtgatagagatactgagcacagctgtcaccggatgtgctttccggtctgatgagtccgtgaggacgaaacagcctctacaaataattttgtttaaatcacacgggtaaggaggtatttaaatgaaaacactgtcccaagcacagtcgaagacgagtagccagcagttttctttcaccggtaattctagcgctaacgtgattatcggcaaccagaaactaactatcaacgacgtcgcccgcgttgctcggaacgggaccttagtaagcctgactaacaacactgatatacttcaaggcattcaggcgtcctgtgattatatcaataacgcagttgagtctggtgaaccaatttacggtgtgacctcaggcttcggcggtatggcgaacgttgctatcagccgtgaacaggcctccgaactgcaacacaatatggtatggtatctgaaaactggtgctgggaacaaactccctttggcggacgtacgtgcagcaatgctgctgcgcgccaactcgcatatgcgtggcgcgtccggtatccgtctggagctgatcaaacgtatggaaatcttcttgaacgctggtgttactccgtacgtttatgaatttggatctatcggcgcttctggagatctggtcccgctgagctacattacgggttccctgattggccttgacccgagcttcaaggtggatttcaacggcaaagaaatggacgccccgaccgcgttacgccagttaaatctgtctcccctgacacttctgcctaaagaagcgctagctatgattaatgggacctcagtcatgactggcatcgcagctaactgcgtatacgacacccagatcctgactgcgattgcaatgggtgttcacgctctggatatccaggccctgaacggcaccaaccagtctttccacccgtttatccataactctaagccgcacccaggtcagctgtgggcggctgatcagatgatatcattgctggctaactcgcaactggtacgggacgagctggacggcaaacatgattaccgcgaccacgagctgatccaggatcgttatagcctgcgttgccttccgcagtacctgggtccgattgtggacggtatctcacagatagcaaaacaaatcgaaattgaaattaactccgttactgataaccctctgattgacgtcgataaccaggcgtcgtaccacggcggaaatttcctgggtcagtatgttggcatgggtatggaccaccttcgctactatatcggcctgctggcgaaacacctggatgtgcagattgcgctgctagctagtcccgaatttagcaacggactgccgccatctttattgggcaaccgtgaacgtaaggttaacatgggtctgaaaggtttacaaatctgtggcaattccatcatgccgctgctgacgttctacggcaatagcatcgccgaccgctttccgacccatgcagagcaattcaaccagaatatcaactctcagggctacacctccgcaacgctggcgcgacgtagtgttgatatcttccaaaactacgttgcgattgccctgatgtttggcgtccaggctgtagacctgaggacttataaaaagactggccattacgatgcgcgtgcttgcctctctccggctaccgaacgcctgtattccgccgtgcgtcacgtagttggtcagaaacctacttcagatcgcccatacatctggaacgataacgagcagggtctggatgaacacatcgctcgcatctccgctgacattgccgctggcggagtaattgttcaagctgtacaggatatcctgccgtgcctgcactaaccggcttatcggtcagtttcacctgatttacgtaaaaacccgcttcggcgggtttttgcttttggaggggcagaaagatgaatgactgtccacgacgctatacccaaaagaaa

SEQ ID NO: 252 - DNA, 5122 bp, synthetic construct
  source 1..5122: mol_type = other DNA
aggctaggtggaggctcagtgatgataagtctgcgatggtggatgcatgtgtcatggtcatagctgtttcctgtgtgaaattgttatccgctcagagggcacaatcctattccgcgctatccgacaatctccaagacattaggtggagttcagttcggcgagcggaaatggcttacgaacggggcggagatttcctggaagatgccaggaagatacttaacagggaagtgagagggccgcggcaaagccgtttttccataggctccgcccccctgacaagcatcacgaaatctgacgctcaaatcagtggtggcgaaacccgacaggactataaagataccaggcgtttccccctggcggctccctcgtgcgctctcctgttcctgcctttcggtttaccggtgtcattccgctgttatggccgcgtttgtctcattccacgcctgacactcagttccgggtaggcagttcgctccaagctggactgtatgcacgaaccccccgttcagtccgaccgctgcgccttatccggtaactatcgtcttgagtccaacccggaaagacatgcaaaagcaccactggcagcagccactggtaattgatttagaggagttagtcttgaagtcatgcgccggttaaggctaaactgaaaggacaagttttggtgactgcgctcctccaagccagttacctcggttcaaagagttggtagctcagagaaccttcgaaaaaccgccctgcaaggcggttttttcgttttcagagcaagagattacgcgcagaccaaaacgatctcaagaagatcatcttattaagtctgacgctctattcaacaaagccgccgtccatgggtagggggcttcaaatcgtcctcgtgataccaattcggagcctgcttttttgtacaaacttgttgataatggcaattcaaggatcttcacctagatccttttaaattaaaaatgaagttttaaatcaatctaaagtatatatgagtaaacttggtctgacagttaccaatgcttaatcagtgaggcacctatctcagcgatctgtctatttcgttcatccatagttgcctgactccccgtcgtgtagataactacgatacgggagggcttaccatctggccccagtgctgcaatgataccgcgagagccacgctcaccggctccagatttatcagcaataaaccagccagccggaagggccgagcgcagaagtggtcctgcaactttatccgcctccatccagtctattaattgttgccgggaagctagagtaagtagttcgccagttaatagtttgcgcaacgttgttgccattgctacaggcatcgtggtgtcacgctcgtcgtttggtatggcttcattcagctccggttcccaacgatcaaggcgagttacatgatcccccatgttgtgcaaaaaagcggttagctccttcggtcctccgatcgttgtcagaagtaagttggccgcagtgttatcactcatggttatggcagcactgcataattctcttactgtcatgccatccgtaagatgcttttctgtgactggtgagtactcaaccaagtcattctgagaatagtgtatgcggcgaccgagttgctcttgcccggcgtcaatacgggataataccgcgccacatagcagaactttaaaagtgctcatcattggaaaacgttcttcggggcgaaaactctcaaggatcttaccgctgttgagatccagttcgatgtaacccactcgtgcacccaactgatcttcagcatcttttactttcaccagcgtttctgggtgagcaaaaacaggaaggcaaaatgccgcaaaaaagggaataagggcgacacggaaatgttgaatactcatactcttcctttttcaatattattgaagcatttatcagggttattgtctcatgagcggatacatatttgaatgtatttagaaaaataaacaaataggggttccgcgcacatttccccgaaaagtgccagatacctgaaacaaaacccatcgtacggccaaggaagtctccaataactgtgatccaccacaagcgccagggttttcccagtcacgacgttgtaaaacgacggccagtcatgcataatccgcacgcatctggaataaggaagtgccattccgcctgacctttgcctatgaggaccaaaacgaaaaaacaccctttcgggtgtcttttctggaatttggtaccgagaggctccatgattcagtatgacttgcctttggtcgaaaaaaaaagcccgcactgtcaggtgcgggcttttttctgtgtttccttattaggacccactttcacatttaagttgtttttctaatccgcatatgatcaattcaaggccgaataagaaggctggctctgcaccttggtgatcaaataattcgatagcttgtcgtaataatggcggcatactatcagtagtaggtgtttccctttcttctttagcgacttgatgctcttgatcttccaatacgcaacctaaagtaaaatgccccacagcgctgagtgcatataatgcattctctagtgaaaaaccttgttggcataaaaaggctaattgattttcgagagtttcatactgtttttctgtaggccgtgtacctaaatgtacttttgctccatcgcgatgacttagtaaagcacatctaaaacttttagcgttattacgtaaaaaatcttgccagctttccccttctaaagggcaaaagtgagtatggtgcctatctaacatctcaatggctaaggcgtcgagcaaagcccgcttattttttacatgccaatacaatgtaggctgctctacacctagcttctgggcgagtttacgggttgttaaaccttcgattccgacctcattaagcagctctaatgcgctgttaatcactttacttttatctaatctggacatattcaccaccctgaattgactctcttccgggcgctatcatgccataccgcgaaaggttttgcgccattcgatggcgcgccgccattgcttgtgcaatgtacatcagagattttgagacacaaccaattattgaaggcctccctaacggggggcctttttttgtttctggtcccccgcttaacgatcgttggctgttttcagcaggacgcactgacctccctatcagtgatagagattgacatccctatcagtgatagagatactgagcacagctgtcaccggatgtgctttccggtctgatgagtccgtgaggacgaaacagcctctacaaataattttgtttaaatcacacgggtaaggaggtatttaaatgaaaacactgtcccaagcacagtcgaagacgagtagccagcagttttctttcaccggtaattctagcgctaacgtgattatcggcaaccagaaactaactatcaacgacgtcgcccgcgttgctcggaacgggaccttagtaagcctgactaacaacactgatatacttcaaggcattcaggcgtcctgtgattatatcaataacgcagttgagtctggtgaaccaatttacggtgtgacctcaggcttcggcggtatggcgaacgttgctatcagccgtgaacaggcctccgaactgcaaaccaatttggtatggtatctgaaaactggtgctgggaacaaactccctttggcggacgtacgtgcagcaatgctgctgcgcgccaactcgcatatgcgtggcgcgtccggtatccgtctggagctgatcaaacgtatggaaatcttcttgaacgctggtgttactccgtacgtttatgaatttggatctatcggcgcttctggagatctggtcccgctgagctacattacgggttccctgattggccttgacccgagcttcaaggtggatttcaacggcaaagaaatggacgccccgaccgcgttacgccagttaaatctgtctcccctgacacttctgcctaaagaaggtattgctatgaataatgggacctcagtcatgactggcatcgcagctaactgcgtatacgacacccagatcctgactgcgattgcaatgggtgttcacgctctggatatccaggccctgaacggcaccaaccagtctttccacccgtttatccataactctaagccgcacccaggtcagctgtgggcggctgatcagatgatatcattgctggctaactcgcaactggtacgggacgagctggacggcaaacatgattaccgcgaccacgagctgatccaggatcgttatagcctgcgttgccttccgcagtacctgggtccgattgtggacggtatctcacagatagcaaaacaaatcgaaattgaaattaactccgttactgataaccctctgattgacgtcgataaccaggcgtcgtaccacggcggaaatttcctgggtcagtatgttggcatgggtatggaccaccttcgctactatatcggcctgctggcgaaacacctggatgtgcagattgcgctgctagctagtcccgaatttagcaacggactgccgccatctttattgggcaaccgtgaacgtaaggttaacatgggtctgaaaggtttacaaatctgtggcaattccatcatgccgctgctgacgttctacggcaatagcatcgccgaccgctttccgacccatgcagagcaattcaaccagaatatcaactctcagggctacacctccgcaacgctggcgcgacgtagtgttgatatcttccaaaactacgttgcgattgccctgatgtttggcgtccaggctgtagacctgaggacttataaaaagactggccattacgatgcgcgtgcttgcctctctccggctaccgaacgcctgtattccgccgtgcgtcacgtagttggtcagaaacctacttcagatcgcccatacatctggaacgataacgagcagggtctggatgaacacatcgctcgcatctccgctgacattgccgctggcggagtaattgttcaagctgtacaggatatcctgccgtgcctgcactaaccggcttatcggtcagtttcacctgatttacgtaaaaacccgcttcggcgggtttttgcttttggaggggcagaaagatgaatgactgtccacgacgctatacccaaaagaaa

SEQ ID NO: 253 - DNA, 5122 bp, synthetic construct
  source 1..5122: mol_type = other DNA
aggctaggtggaggctcagtgatgataagtctgcgatggtggatgcatgtgtcatggtcatagctgtttcctgtgtgaaattgttatccgctcagagggcacaatcctattccgcgctatccgacaatctccaagacattaggtggagttcagttcggcgagcggaaatggcttacgaacggggcggagatttcctggaagatgccaggaagatacttaacagggaagtgagagggccgcggcaaagccgtttttccataggctccgcccccctgacaagcatcacgaaatctgacgctcaaatcagtggtggcgaaacccgacaggactataaagataccaggcgtttccccctggcggctccctcgtgcgctctcctgttcctgcctttcggtttaccggtgtcattccgctgttatggccgcgtttgtctcattccacgcctgacactcagttccgggtaggcagttcgctccaagctggactgtatgcacgaaccccccgttcagtccgaccgctgcgccttatccggtaactatcgtcttgagtccaacccggaaagacatgcaaaagcaccactggcagcagccactggtaattgatttagaggagttagtcttgaagtcatgcgccggttaaggctaaactgaaaggacaagttttggtgactgcgctcctccaagccagttacctcggttcaaagagttggtagctcagagaaccttcgaaaaaccgccctgcaaggcggttttttcgttttcagagcaagagattacgcgcagaccaaaacgatctcaagaagatcatcttattaagtctgacgctctattcaacaaagccgccgtccatgggtagggggcttcaaatcgtcctcgtgataccaattcggagcctgcttttttgtacaaacttgttgataatggcaattcaaggatcttcacctagatccttttaaattaaaaatgaagttttaaatcaatctaaagtatatatgagtaaacttggtctgacagttaccaatgcttaatcagtgaggcacctatctcagcgatctgtctatttcgttcatccatagttgcctgactccccgtcgtgtagataactacgatacgggagggcttaccatctggccccagtgctgcaatgataccgcgagagccacgctcaccggctccagatttatcagcaataaaccagccagccggaagggccgagcgcagaagtggtcctgcaactttatccgcctccatccagtctattaattgttgccgggaagctagagtaagtagttcgccagttaatagtttgcgcaacgttgttgccattgctacaggcatcgtggtgtcacgctcgtcgtttggtatggcttcattcagctccggttcccaacgatcaaggcgagttacatgatcccccatgttgtgcaaaaaagcggttagctccttcggtcctccgatcgttgtcagaagtaagttggccgcagtgttatcactcatggttatggcagcactgcataattctcttactgtcatgccatccgtaagatgcttttctgtgactggtgagtactcaaccaagtcattctgagaatagtgtatgcggcgaccgagttgctcttgcccggcgtcaatacgggataataccgcgccacatagcagaactttaaaagtgctcatcattggaaaacgttcttcggggcgaaaactctcaaggatcttaccgctgttgagatccagttcgatgtaacccactcgtgcacccaactgatcttcagcatcttttactttcaccagcgtttctgggtgagcaaaaacaggaaggcaaaatgccgcaaaaaagggaataagggcgacacggaaatgttgaatactcatactcttcctttttcaatattattgaagcatttatcagggttattgtctcatgagcggatacatatttgaatgtatttagaaaaataaacaaataggggttccgcgcacatttccccgaaaagtgccagatacctgaaacaaaacccatcgtacggccaaggaagtctccaataactgtgatccaccacaagcgccagggttttcccagtcacgacgttgtaaaacgacggccagtcatgcataatccgcacgcatctggaataaggaagtgccattccgcctgacctttgcctatgaggaccaaaacgaaaaaacaccctttcgggtgtcttttctggaatttggtaccgagaggctccatgattcagtatgacttgcctttggtcgaaaaaaaaagcccgcactgtcaggtgcgggcttttttctgtgtttccttattaggacccactttcacatttaagttgtttttctaatccgcatatgatcaattcaaggccgaataagaaggctggctctgcaccttggtgatcaaataattcgatagcttgtcgtaataatggcggcatactatcagtagtaggtgtttccctttcttctttagcgacttgatgctcttgatcttccaatacgcaacctaaagtaaaatgccccacagcgctgagtgcatataatgcattctctagtgaaaaaccttgttggcataaaaaggctaattgattttcgagagtttcatactgtttttctgtaggccgtgtacctaaatgtacttttgctccatcgcgatgacttagtaaagcacatctaaaacttttagcgttattacgtaaaaaatcttgccagctttccccttctaaagggcaaaagtgagtatggtgcctatctaacatctcaatggctaaggcgtcgagcaaagcccgcttattttttacatgccaatacaatgtaggctgctctacacctagcttctgggcgagtttacgggttgttaaaccttcgattccgacctcattaagcagctctaatgcgctgttaatcactttacttttatctaatctggacatattcaccaccctgaattgactctcttccgggcgctatcatgccataccgcgaaaggttttgcgccattcgatggcgcgccgccattgcttgtgcaatgtacatcagagattttgagacacaaccaattattgaaggcctccctaacggggggcctttttttgtttctggtcccccgcttaacgatcgttggctgttttcagcaggacgcactgacctccctatcagtgatagagattgacatccctatcagtgatagagatactgagcacagctgtcaccggatgtgctttccggtctgatgagtccgtgaggacgaaacagcctctacaaataattttgtttaaatcacacgggtaaggaggtatttaaatgaaaacactgtcccaagcacagtcgaagacgagtagccagcagttttctttcaccggtaattctagcgctaacgtgattatcggcaaccagaaactaactatcaacgacgtcgcccgcgttgctcggaacgggaccttagtaagcctgactaacaacactgatatacttcaaggcattcaggcgtcctgtgattatatcaataacgcagttgagtctggtgaaccaatttacggtgtgacctcaggcttcggcggtatggcgaacgttgctatcagccgtgaacaggcctccgaactgcaaagcaatgcggtatggtatatgaaaactggtgctgggaacaaactccctttggcggacgtacgtgcagcaatgctgctgcgcgccaactcgcatatgcgtggcgcgtccggtatccgtctggagctgatcaaacgtatggaaatcttcttgaacgctggtgttactccgtacgtttatgaatttggatctatcggcgcttctggagatctggtcccgctgagctacattacgggttccctgattggccttgacccgagcttcaaggtggatttcaacggcaaagaaatggacgccccgaccgcgttacgccagttaaatctgtctcccctgacacttctgcctaaagaaggtctagctatgatgaatgggacctcagtcatgactggcatcgcagctaactgcgtatacgacacccagatcctgactgcgattgcaatgggtgttcacgctctggatatccaggccctgaacggcaccaaccagtctttccacccgtttatccataactctaagccgcacccaggtcagctgtgggcggctgatcagatgatatcattgctggctaactcgcaactggtacgggacgagctggacggcaaacatgattaccgcgaccacgagctgatccaggatcgttatagcctgcgttgccttccgcagtacctgggtccgattgtggacggtatctcacagatagcaaaacaaatcgaaattgaaattaactccgttactgataaccctctgattgacgtcgataaccaggcgtcgtaccacggcggaaatttcctgggtcagtatgttggcatgggtatggaccaccttcgctactatatcggcctgctggcgaaacacctggatgtgcagattgcgctgctagctagtcccgaatttagcaacggactgccgccatctttattgggcaaccgtgaacgtaaggttaacatgggtctgaaaggtttacaaatctgtggcaattccatcatgccgctgctgacgttctacggcaatagcatcgccgaccgctttccgacccatgcagagcaattcaaccagaatatcaactctcagggctacacctccgcaacgctggcgcgacgtagtgttgatatcttccaaaactacgttgcgattgccctgatgtttggcgtccaggctgtagacctgaggacttataaaaagactggccattacgatgcgcgtgcttgcctctctccggctaccgaacgcctgtattccgccgtgcgtcacgtagttggtcagaaacctacttcagatcgcccatacatctggaacgataacgagcagggtctggatgaacacatcgctcgcatctccgctgacattgccgctggcggagtaattgttcaagctgtacaggatatcctgccgtgcctgcactaaccggcttatcggtcagtttcacctgatttacgtaaaaacccgcttcggcgggtttttgcttttggaggggcagaaagatgaatgactgtccacgacgctatacccaaaagaaa

SEQ ID NO: 254 - DNA, 5122 bp, synthetic construct
  source 1..5122: mol_type = other DNA
aggctaggtggaggctcagtgatgataagtctgcgatggtggatgcatgtgtcatggtcatagctgtttcctgtgtgaaattgttatccgctcagagggcacaatcctattccgcgctatccgacaatctccaagacattaggtggagttcagttcggcgagcggaaatggcttacgaacggggcggagatttcctggaagatgccaggaagatacttaacagggaagtgagagggccgcggcaaagccgtttttccataggctccgcccccctgacaagcatcacgaaatctgacgctcaaatcagtggtggcgaaacccgacaggactataaagataccaggcgtttccccctggcggctccctcgtgcgctctcctgttcctgcctttcggtttaccggtgtcattccgctgttatggccgcgtttgtctcattccacgcctgacactcagttccgggtaggcagttcgctccaagctggactgtatgcacgaaccccccgttcagtccgaccgctgcgccttatccggtaactatcgtcttgagtccaacccggaaagacatgcaaaagcaccactggcagcagccactggtaattgatttagaggagttagtcttgaagtcatgcgccggttaaggctaaactgaaaggacaagttttggtgactgcgctcctccaagccagttacctcggttcaaagagttggtagctcagagaaccttcgaaaaaccgccctgcaaggcggttttttcgttttcagagcaagagattacgcgcagaccaaaacgatctcaagaagatcatcttattaagtctgacgctctattcaacaaagccgccgtccatgggtagggggcttcaaatcgtcctcgtgataccaattcggagcctgcttttttgtacaaacttgttgataatggcaattcaaggatcttcacctagatccttttaaattaaaaatgaagttttaaatcaatctaaagtatatatgagtaaacttggtctgacagttaccaatgcttaatcagtgaggcacctatctcagcgatctgtctatttcgttcatccatagttgcctgactccccgtcgtgtagataactacgatacgggagggcttaccatctggccccagtgctgcaatgataccgcgagagccacgctcaccggctccagatttatcagcaataaaccagccagccggaagggccgagcgcagaagtggtcctgcaactttatccgcctccatccagtctattaattgttgccgggaagctagagtaagtagttcgccagttaatagtttgcgcaacgttgttgccattgctacaggcatcgtggtgtcacgctcgtcgtttggtatggcttcattcagctccggttcccaacgatcaaggcgagttacatgatcccccatgttgtgcaaaaaagcggttagctccttcggtcctccgatcgttgtcagaagtaagttggccgcagtgttatcactcatggttatggcagcactgcataattctcttactgtcatgccatccgtaagatgcttttctgtgactggtgagtactcaaccaagtcattctgagaatagtgtatgcggcgaccgagttgctcttgcccggcgtcaatacgggataataccgcgccacatagcagaactttaaaagtgctcatcattggaaaacgttcttcggggcgaaaactctcaaggatcttaccgctgttgagatccagttcgatgtaacccactcgtgcacccaactgatcttcagcatcttttactttcaccagcgtttctgggtgagcaaaaacaggaaggcaaaatgccgcaaaaaagggaataagggcgacacggaaatgttgaatactcatactcttcctttttcaatattattgaagcatttatcagggttattgtctcatgagcggatacatatttgaatgtatttagaaaaataaacaaataggggttccgcgcacatttccccgaaaagtgccagatacctgaaacaaaacccatcgtacggccaaggaagtctccaataactgtgatccaccacaagcgccagggttttcccagtcacgacgttgtaaaacgacggccagtcatgcataatccgcacgcatctggaataaggaagtgccattccgcctgacctttgcctatgaggaccaaaacgaaaaaacaccctttcgggtgtcttttctggaatttggtaccgagaggctccatgattcagtatgacttgcctttggtcgaaaaaaaaagcccgcactgtcaggtgcgggcttttttctgtgtttccttattaggacccactttcacatttaagttgtttttctaatccgcatatgatcaattcaaggccgaataagaaggctggctctgcaccttggtgatcaaataattcgatagcttgtcgtaataatggcggcatactatcagtagtaggtgtttccctttcttctttagcgacttgatgctcttgatcttccaatacgcaacctaaagtaaaatgccccacagcgctgagtgcatataatgcattctctagtgaaaaaccttgttggcataaaaaggctaattgattttcgagagtttcatactgtttttctgtaggccgtgtacctaaatgtacttttgctccatcgcgatgacttagtaaagcacatctaaaacttttagcgttattacgtaaaaaatcttgccagctttccccttctaaagggcaaaagtgagtatggtgcctatctaacatctcaatggctaaggcgtcgagcaaagcccgcttattttttacatgccaatacaatgtaggctgctctacacctagcttctgggcgagtttacgggttgttaaaccttcgattccgacctcattaagcagctctaatgcgctgttaatcactttacttttatctaatctggacatattcaccaccctgaattgactctcttccgggcgctatcatgccataccgcgaaaggttttgcgccattcgatggcgcgccgccattgcttgtgcaatgtacatcagagattttgagacacaaccaattattgaaggcctccctaacggggggcctttttttgtttctggtcccccgcttaacgatcgttggctgttttcagcaggacgcactgacctccctatcagtgatagagattgacatccctatcagtgatagagatactgagcacagctgtcaccggatgtgctttccggtctgatgagtccgtgaggacgaaacagcctctacaaataattttgtttaaatcacacgggtaaggaggtatttaaatgaaaacactgtcccaagcacagtcgaagacgagtagccagcagttttctttcaccggtaattctagcgctaacgtgattatcggcaaccagaaactaactatcaacgacgtcgcccgcgttgctcggaacgggaccttagtaagcctgactaacaacactgatatacttcaaggcattcaggcgtcctgtgattatatcaataacgcagttgagtctggtgaaccaatttacggtgtgacctcaggcttcggcggtatggcgaacgttgctatcagccgtgaacaggcctccgaactgcaagagaatttggtatggtatatgaaaactggtgctgggaacaaactccctttggcggacgtacgtgcagcaatgctgctgcgcgccaactcgcatatgcgtggcgcgtccggtatccgtctggagctgatcaaacgtatggaaatcttcttgaacgctggtgttactccgtacgtttatgaatttggatctatcggcgcttctggagatctggtcccgctgagctacattacgggttccctgattggccttgacccgagcttcaaggtggatttcaacggcaaagaaatggacgccccgaccgcgttacgccagttaaatctgtctcccctgacacttctgcctaaagaagccattgctatggtgaatgggacctcagtcatgactggcatcgcagctaactgcgtatacgacacccagatcctgactgcgattgcaatgggtgttcacgctctggatatccaggccctgaacggcaccaaccagtctttccacccgtttatccataactctaagccgcacccaggtcagctgtgggcggctgatcagatgatatcattgctggctaactcgcaactggtacgggacgagctggacggcaaacatgattaccgcgaccacgagctgatccaggatcgttatagcctgcgttgccttccgcagtacctgggtccgattgtggacggtatctcacagatagcaaaacaaatcgaaattgaaattaactccgttactgataaccctctgattgacgtcgataaccaggcgtcgtaccacggcggaaatttcctgggtcagtatgttggcatgggtatggaccaccttcgctactatatcggcctgctggcgaaacacctggatgtgcagattgcgctgctagctagtcccgaatttagcaacggactgccgccatctttattgggcaaccgtgaacgtaaggttaacatgggtctgaaaggtttacaaatctgtggcaattccatcatgccgctgctgacgttctacggcaatagcatcgccgaccgctttccgacccatgcagagcaattcaaccagaatatcaactctcagggctacacctccgcaacgctggcgcgacgtagtgttgatatcttccaaaactacgttgcgattgccctgatgtttggcgtccaggctgtagacctgaggacttataaaaagactggccattacgatgcgcgtgcttgcctctctccggctaccgaacgcctgtattccgccgtgcgtcacgtagttggtcagaaacctacttcagatcgcccatacatctggaacgataacgagcagggtctggatgaacacatcgctcgcatctccgctgacattgccgctggcggagtaattgttcaagctgtacaggatatcctgccgtgcctgcactaaccggcttatcggtcagtttcacctgatttacgtaaaaacccgcttcggcgggtttttgcttttggaggggcagaaagatgaatgactgtccacgacgctatacccaaaagaaa

SEQ ID NO: 255 - DNA, 5122 bp, synthetic construct
  source 1..5122: mol_type = other DNA
aggctaggtggaggctcagtgatgataagtctgcgatggtggatgcatgtgtcatggtcatagctgtttcctgtgtgaaattgttatccgctcagagggcacaatcctattccgcgctatccgacaatctccaagacattaggtggagttcagttcggcgagcggaaatggcttacgaacggggcggagatttcctggaagatgccaggaagatacttaacagggaagtgagagggccgcggcaaagccgtttttccataggctccgcccccctgacaagcatcacgaaatctgacgctcaaatcagtggtggcgaaacccgacaggactataaagataccaggcgtttccccctggcggctccctcgtgcgctctcctgttcctgcctttcggtttaccggtgtcattccgctgttatggccgcgtttgtctcattccacgcctgacactcagttccgggtaggcagttcgctccaagctggactgtatgcacgaaccccccgttcagtccgaccgctgcgccttatccggtaactatcgtcttgagtccaacccggaaagacatgcaaaagcaccactggcagcagccactggtaattgatttagaggagttagtcttgaagtcatgcgccggttaaggctaaactgaaaggacaagttttggtgactgcgctcctccaagccagttacctcggttcaaagagttggtagctcagagaaccttcgaaaaaccgccctgcaaggcggttttttcgttttcagagcaagagattacgcgcagaccaaaacgatctcaagaagatcatcttattaagtctgacgctctattcaacaaagccgccgtccatgggtagggggcttcaaatcgtcctcgtgataccaattcggagcctgcttttttgtacaaacttgttgataatggcaattcaaggatcttcacctagatccttttaaattaaaaatgaagttttaaatcaatctaaagtatatatgagtaaacttggtctgacagttaccaatgcttaatcagtgaggcacctatctcagcgatctgtctatttcgttcatccatagttgcctgactccccgtcgtgtagataactacgatacgggagggcttaccatctggccccagtgctgcaatgataccgcgagagccacgctcaccggctccagatttatcagcaataaaccagccagccggaagggccgagcgcagaagtggtcctgcaactttatccgcctccatccagtctattaattgttgccgggaagctagagtaagtagttcgccagttaatagtttgcgcaacgttgttgccattgctacaggcatcgtggtgtcacgctcgtcgtttggtatggcttcattcagctccggttcccaacgatcaaggcgagttacatgatcccccatgttgtgcaaaaaagcggttagctccttcggtcctccgatcgttgtcagaagtaagttggccgcagtgttatcactcatggttatggcagcactgcataattctcttactgtcatgccatccgtaagatgcttttctgtgactggtgagtactcaaccaagtcattctgagaatagtgtatgcggcgaccgagttgctcttgcccggcgtcaatacgggataataccgcgccacatagcagaactttaaaagtgctcatcattggaaaacgttcttcggggcgaaaactctcaaggatcttaccgctgttgagatccagttcgatgtaacccactcgtgcacccaactgatcttcagcatcttttactttcaccagcgtttctgggtgagcaaaaacaggaaggcaaaatgccgcaaaaaagggaataagggcgacacggaaatgttgaatactcatactcttcctttttcaatattattgaagcatttatcagggttattgtctcatgagcggatacatatttgaatgtatttagaaaaataaacaaataggggttccgcgcacatttccccgaaaagtgccagatacctgaaacaaaacccatcgtacggccaaggaagtctccaataactgtgatccaccacaagcgccagggttttcccagtcacgacgttgtaaaacgacggccagtcatgcataatccgcacgcatctggaataaggaagtgccattccgcctgacctttgcctatgaggaccaaaacgaaaaaacaccctttcgggtgtcttttctggaatttggtaccgagaggctccatgattcagtatgacttgcctttggtcgaaaaaaaaagcccgcactgtcaggtgcgggcttttttctgtgtttccttattaggacccactttcacatttaagttgtttttctaatccgcatatgatcaattcaaggccgaataagaaggctggctctgcaccttggtgatcaaataattcgatagcttgtcgtaataatggcggcatactatcagtagtaggtgtttccctttcttctttagcgacttgatgctcttgatcttccaatacgcaacctaaagtaaaatgccccacagcgctgagtgcatataatgcattctctagtgaaaaaccttgttggcataaaaaggctaattgattttcgagagtttcatactgtttttctgtaggccgtgtacctaaatgtacttttgctccatcgcgatgacttagtaaagcacatctaaaacttttagcgttattacgtaaaaaatcttgccagctttccccttctaaagggcaaaagtgagtatggtgcctatctaacatctcaatggctaaggcgtcgagcaaagcccgcttattttttacatgccaatacaatgtaggctgctctacacctagcttctgggcgagtttacgggttgttaaaccttcgattccgacctcattaagcagctctaatgcgctgttaatcactttacttttatctaatctggacatattcaccaccctgaattgactctcttccgggcgctatcatgccataccgcgaaaggttttgcgccattcgatggcgcgccgccattgcttgtgcaatgtacatcagagattttgagacacaaccaattattgaaggcctccctaacggggggcctttttttgtttctggtcccccgcttaacgatcgttggctgttttcagcaggacgcactgacctccctatcagtgatagagattgacatccctatcagtgatagagatactgagcacagctgtcaccggatgtgctttccggtctgatgagtccgtgaggacgaaacagcctctacaaataattttgtttaaatcacacgggtaaggaggtatttaaatgaaaacactgtcccaagcacagtcgaagacgagtagccagcagttttctttcaccggtaattctagcgctaacgtgattatcggcaaccagaaactaactatcaacgacgtcgcccgcgttgctcggaacgggaccttagtaagcctgactaacaacactgatatacttcaaggcattcaggcgtcctgtgattatatcaataacgcagttgagtctggtgaaccaatttacggtgtgacctcaggcttcggcggtatggcgaacgttgctatcagccgtgaacaggcctccgaactgcaaaagaatatggtatggtatgtgaaaactggtgctgggaacaaactccctttggcggacgtacgtgcagcaatgctgctgcgcgccaactcgcatatgcgtggcgcgtccggtatccgtctggagctgatcaaacgtatggaaatcttcttgaacgctggtgttactccgtacgtttatgaatttggatctatcggcgcttctggagatctggtcccgctgagctacattacgggttccctgattggccttgacccgagcttcaaggtggatttcaacggcaaagaaatggacgccccgaccgcgttacgccagttaaatctgtctcccctgacacttctgcctaaagaatcgctagctatgaataatgggacctcagtcatgactggcatcgcagctaactgcgtatacgacacccagatcctgactgcgattgcaatgggtgttcacgctctggatatccaggccctgaacggcaccaaccagtctttccacccgtttatccataactctaagccgcacccaggtcagctgtgggcggctgatcagatgatatcattgctggctaactcgcaactggtacgggacgagctggacggcaaacatgattaccgcgaccacgagctgatccaggatcgttatagcctgcgttgccttccgcagtacctgggtccgattgtggacggtatctcacagatagcaaaacaaatcgaaattgaaattaactccgttactgataaccctctgattgacgtcgataaccaggcgtcgtaccacggcggaaatttcctgggtcagtatgttggcatgggtatggaccaccttcgctactatatcggcctgctggcgaaacacctggatgtgcagattgcgctgctagctagtcccgaatttagcaacggactgccgccatctttattgggcaaccgtgaacgtaaggttaacatgggtctgaaaggtttacaaatctgtggcaattccatcatgccgctgctgacgttctacggcaatagcatcgccgaccgctttccgacccatgcagagcaattcaaccagaatatcaactctcagggctacacctccgcaacgctggcgcgacgtagtgttgatatcttccaaaactacgttgcgattgccctgatgtttggcgtccaggctgtagacctgaggacttataaaaagactggccattacgatgcgcgtgcttgcctctctccggctaccgaacgcctgtattccgccgtgcgtcacgtagttggtcagaaacctacttcagatcgcccatacatctggaacgataacgagcagggtctggatgaacacatcgctcgcatctccgctgacattgccgctggcggagtaattgttcaagctgtacaggatatcctgccgtgcctgcactaaccggcttatcggtcagtttcacctgatttacgtaaaaacccgcttcggcgggtttttgcttttggaggggcagaaagatgaatgactgtccacgacgctatacccaaaagaaa

SEQ ID NO: 256 - DNA, 5122 bp, synthetic construct
  source 1..5122: mol_type = other DNA
aggctaggtggaggctcagtgatgataagtctgcgatggtggatgcatgtgtcatggtcatagctgtttcctgtgtgaaattgttatccgctcagagggcacaatcctattccgcgctatccgacaatctccaagacattaggtggagttcagttcggcgagcggaaatggcttacgaacggggcggagatttcctggaagatgccaggaagatacttaacagggaagtgagagggccgcggcaaagccgtttttccataggctccgcccccctgacaagcatcacgaaatctgacgctcaaatcagtggtggcgaaacccgacaggactataaagataccaggcgtttccccctggcggctccctcgtgcgctctcctgttcctgcctttcggtttaccggtgtcattccgctgttatggccgcgtttgtctcattccacgcctgacactcagttccgggtaggcagttcgctccaagctggactgtatgcacgaaccccccgttcagtccgaccgctgcgccttatccggtaactatcgtcttgagtccaacccggaaagacatgcaaaagcaccactggcagcagccactggtaattgatttagaggagttagtcttgaagtcatgcgccggttaaggctaaactgaaaggacaagttttggtgactgcgctcctccaagccagttacctcggttcaaagagttggtagctcagagaaccttcgaaaaaccgccctgcaaggcggttttttcgttttcagagcaagagattacgcgcagaccaaaacgatctcaagaagatcatcttattaagtctgacgctctattcaacaaagccgccgtccatgggtagggggcttcaaatcgtcctcgtgataccaattcggagcctgcttttttgtacaaacttgttgataatggcaattcaaggatcttcacctagatccttttaaattaaaaatgaagttttaaatcaatctaaagtatatatgagtaaacttggtctgacagttaccaatgcttaatcagtgaggcacctatctcagcgatctgtctatttcgttcatccatagttgcctgactccccgtcgtgtagataactacgatacgggagggcttaccatctggccccagtgctgcaatgataccgcgagagccacgctcaccggctccagatttatcagcaataaaccagccagccggaagggccgagcgcagaagtggtcctgcaactttatccgcctccatccagtctattaattgttgccgggaagctagagtaagtagttcgccagttaatagtttgcgcaacgttgttgccattgctacaggcatcgtggtgtcacgctcgtcgtttggtatggcttcattcagctccggttcccaacgatcaaggcgagttacatgatcccccatgttgtgcaaaaaagcggttagctccttcggtcctccgatcgttgtcagaagtaagttggccgcagtgttatcactcatggttatggcagcactgcataattctcttactgtcatgccatccgtaagatgcttttctgtgactggtgagtactcaaccaagtcattctgagaatagtgtatgcggcgaccgagttgctcttgcccggcgtcaatacgggataataccgcgccacatagcagaactttaaaagtgctcatcattggaaaacgttcttcggggcgaaaactctcaaggatcttaccgctgttgagatccagttcgatgtaacccactcgtgcacccaactgatcttcagcatcttttactttcaccagcgtttctgggtgagcaaaaacaggaaggcaaaatgccgcaaaaaagggaataagggcgacacggaaatgttgaatactcatactcttcctttttcaatattattgaagcatttatcagggttattgtctcatgagcggatacatatttgaatgtatttagaaaaataaacaaataggggttccgcgcacatttccccgaaaagtgccagatacctgaaacaaaacccatcgtacggccaaggaagtctccaataactgtgatccaccacaagcgccagggttttcccagtcacgacgttgtaaaacgacggccagtcatgcataatccgcacgcatctggaataaggaagtgccattccgcctgacctttgcctatgaggaccaaaacgaaaaaacaccctttcgggtgtcttttctggaatttggtaccgagaggctccatgattcagtatgacttgcctttggtcgaaaaaaaaagcccgcactgtcaggtgcgggcttttttctgtgtttccttattaggacccactttcacatttaagttgtttttctaatccgcatatgatcaattcaaggccgaataagaaggctggctctgcaccttggtgatcaaataattcgatagcttgtcgtaataatggcggcatactatcagtagtaggtgtttccctttcttctttagcgacttgatgctcttgatcttccaatacgcaacctaaagtaaaatgccccacagcgctgagtgcatataatgcattctctagtgaaaaaccttgttggcataaaaaggctaattgattttcgagagtttcatactgtttttctgtaggccgtgtacctaaatgtacttttgctccatcgcgatgacttagtaaagcacatctaaaacttttagcgttattacgtaaaaaatcttgccagctttccccttctaaagggcaaaagtgagtatggtgcctatctaacatctcaatggctaaggcgtcgagcaaagcccgcttattttttacatgccaatacaatgtaggctgctctacacctagcttctgggcgagtttacgggttgttaaaccttcgattccgacctcattaagcagctctaatgcgctgttaatcactttacttttatctaatctggacatattcaccaccctgaattgactctcttccgggcgctatcatgccataccgcgaaaggttttgcgccattcgatggcgcgccgccattgcttgtgcaatgtacatcagagattttgagacacaaccaattattgaaggcctccctaacggggggcctttttttgtttctggtcccccgcttaacgatcgttggctgttttcagcaggacgcactgacctccctatcagtgatagagattgacatccctatcagtgatagagatactgagcacagctgtcaccggatgtgctttccggtctgatgagtccgtgaggacgaaacagcctctacaaataattttgtttaaatcacacgggtaaggaggtatttaaatgaaaacactgtcccaagcacagtcgaagacgagtagccagcagttttctttcaccggtaattctagcgctaacgtgattatcggcaaccagaaactaactatcaacgacgtcgcccgcgttgctcggaacgggaccttagtaagcctgactaacaacactgatatacttcaaggcattcaggcgtcctgtgattatatcaataacgcagttgagtctggtgaaccaatttacggtgtgacctcaggcttcggcggtatggcgaacgttgctatcagccgtgaacaggcctccgaactgcaaaccaatattgtatggcatatgaaaactggtgctgggaacaaactccctttggcggacgtacgtgcagcaatgctgctgcgcgccaactcgcatatgcgtggcgcgtccggtatccgtctggagctgatcaaacgtatggaaatcttcttgaacgctggtgttactccgtacgtttatgaatttggatctatcggcgcttctggagatctggtcccgctgagctacattacgggttccctgattggccttgacccgagcttcaaggtggatttcaacggcaaagaaatggacgccccgaccgcgttacgccagttaaatctgtctcccctgacacttctgcctaaagaaggtattgctatggtgaatgggacctcagtcatgactggcatcgcagctaactgcgtatacgacacccagatcctgactgcgattgcaatgggtgttcacgctctggatatccaggccctgaacggcaccaaccagtctttccacccgtttatccataactctaagccgcacccaggtcagctgtgggcggctgatcagatgatatcattgctggctaactcgcaactggtacgggacgagctggacggcaaacatgattaccgcgaccacgagctgatccaggatcgttatagcctgcgttgccttccgcagtacctgggtccgattgtggacggtatctcacagatagcaaaacaaatcgaaattgaaattaactccgttactgataaccctctgattgacgtcgataaccaggcgtcgtaccacggcggaaatttcctgggtcagtatgttggcatgggtatggaccaccttcgctactatatcggcctgctggcgaaacacctggatgtgcagattgcgctgctagctagtcccgaatttagcaacggactgccgccatctttattgggcaaccgtgaacgtaaggttaacatgggtctgaaaggtttacaaatctgtggcaattccatcatgccgctgctgacgttctacggcaatagcatcgccgaccgctttccgacccatgcagagcaattcaaccagaatatcaactctcagggctacacctccgcaacgctggcgcgacgtagtgttgatatcttccaaaactacgttgcgattgccctgatgtttggcgtccaggctgtagacctgaggacttataaaaagactggccattacgatgcgcgtgcttgcctctctccggctaccgaacgcctgtattccgccgtgcgtcacgtagttggtcagaaacctacttcagatcgcccatacatctggaacgataacgagcagggtctggatgaacacatcgctcgcatctccgctgacattgccgctggcggagtaattgttcaagctgtacaggatatcctgccgtgcctgcactaaccggcttatcggtcagtttcacctgatttacgtaaaaacccgcttcggcgggtttttgcttttggaggggcagaaagatgaatgactgtccacgacgctatacccaaaagaaa

SEQ ID NO: 257 - DNA, 5122 bp, synthetic construct
  source 1..5122: mol_type = other DNA
aggctaggtggaggctcagtgatgataagtctgcgatggtggatgcatgtgtcatggtcatagctgtttcctgtgtgaaattgttatccgctcagagggcacaatcctattccgcgctatccgacaatctccaagacattaggtggagttcagttcggcgagcggaaatggcttacgaacggggcggagatttcctggaagatgccaggaagatacttaacagggaagtgagagggccgcggcaaagccgtttttccataggctccgcccccctgacaagcatcacgaaatctgacgctcaaatcagtggtggcgaaacccgacaggactataaagataccaggcgtttccccctggcggctccctcgtgcgctctcctgttcctgcctttcggtttaccggtgtcattccgctgttatggccgcgtttgtctcattccacgcctgacactcagttccgggtaggcagttcgctccaagctggactgtatgcacgaaccccccgttcagtccgaccgctgcgccttatccggtaactatcgtcttgagtccaacccggaaagacatgcaaaagcaccactggcagcagccactggtaattgatttagaggagttagtcttgaagtcatgcgccggttaaggctaaactgaaaggacaagttttggtgactgcgctcctccaagccagttacctcggttcaaagagttggtagctcagagaaccttcgaaaaaccgccctgcaaggcggttttttcgttttcagagcaagagattacgcgcagaccaaaacgatctcaagaagatcatcttattaagtctgacgctctattcaacaaagccgccgtccatgggtagggggcttcaaatcgtcctcgtgataccaattcggagcctgcttttttgtacaaacttgttgataatggcaattcaaggatcttcacctagatccttttaaattaaaaatgaagttttaaatcaatctaaagtatatatgagtaaacttggtctgacagttaccaatgcttaatcagtgaggcacctatctcagcgatctgtctatttcgttcatccatagttgcctgactccccgtcgtgtagataactacgatacgggagggcttaccatctggccccagtgctgcaatgataccgcgagagccacgctcaccggctccagatttatcagcaataaaccagccagccggaagggccgagcgcagaagtggtcctgcaactttatccgcctccatccagtctattaattgttgccgggaagctagagtaagtagttcgccagttaatagtttgcgcaacgttgttgccattgctacaggcatcgtggtgtcacgctcgtcgtttggtatggcttcattcagctccggttcccaacgatcaaggcgagttacatgatcccccatgttgtgcaaaaaagcggttagctccttcggtcctccgatcgttgtcagaagtaagttggccgcagtgttatcactcatggttatggcagcactgcataattctcttactgtcatgccatccgtaagatgcttttctgtgactggtgagtactcaaccaagtcattctgagaatagtgtatgcggcgaccgagttgctcttgcccggcgtcaatacgggataataccgcgccacatagcagaactttaaaagtgctcatcattggaaaacgttcttcggggcgaaaactctcaaggatcttaccgctgttgagatccagttcgatgtaacccactcgtgcacccaactgatcttcagcatcttttactttcaccagcgtttctgggtgagcaaaaacaggaaggcaaaatgccgcaaaaaagggaataagggcgacacggaaatgttgaatactcatactcttcctttttcaatattattgaagcatttatcagggttattgtctcatgagcggatacatatttgaatgtatttagaaaaataaacaaataggggttccgcgcacatttccccgaaaagtgccagatacctgaaacaaaacccatcgtacggccaaggaagtctccaataactgtgatccaccacaagcgccagggttttcccagtcacgacgttgtaaaacgacggccagtcatgcataatccgcacgcatctggaataaggaagtgccattccgcctgacctttgcctatgaggaccaaaacgaaaaaacaccctttcgggtgtcttttctggaatttggtaccgagaggctccatgattcagtatgacttgcctttggtcgaaaaaaaaagcccgcactgtcaggtgcgggcttttttctgtgtttccttattaggacccactttcacatttaagttgtttttctaatccgcatatgatcaattcaaggccgaataagaaggctggctctgcaccttggtgatcaaataattcgatagcttgtcgtaataatggcggcatactatcagtagtaggtgtttccctttcttctttagcgacttgatgctcttgatcttccaatacgcaacctaaagtaaaatgccccacagcgctgagtgcatataatgcattctctagtgaaaaaccttgttggcataaaaaggctaattgattttcgagagtttcatactgtttttctgtaggccgtgtacctaaatgtacttttgctccatcgcgatgacttagtaaagcacatctaaaacttttagcgttattacgtaaaaaatcttgccagctttccccttctaaagggcaaaagtgagtatggtgcctatctaacatctcaatggctaaggcgtcgagcaaagcccgcttattttttacatgccaatacaatgtaggctgctctacacctagcttctgggcgagtttacgggttgttaaaccttcgattccgacctcattaagcagctctaatgcgctgttaatcactttacttttatctaatctggacatattcaccaccctgaattgactctcttccgggcgctatcatgccataccgcgaaaggttttgcgccattcgatggcgcgccgccattgcttgtgcaatgtacatcagagattttgagacacaaccaattattgaaggcctccctaacggggggcctttttttgtttctggtcccccgcttaacgatcgttggctgttttcagcaggacgcactgacctccctatcagtgatagagattgacatccctatcagtgatagagatactgagcacagctgtcaccggatgtgctttccggtctgatgagtccgtgaggacgaaacagcctctacaaataattttgtttaaatcacacgggtaaggaggtatttaaatgaaaacactgtcccaagcacagtcgaagacgagtagccagcagttttctttcaccggtaattctagcgctaacgtgattatcggcaaccagaaactaactatcaacgacgtcgcccgcgttgctcggaacgggaccttagtaagcctgactaacaacactgatatacttcaaggcattcaggcgtcctgtgattatatcaataacgcagttgagtctggtgaaccaatttacggtgtgacctcaggcttcggcggtatggcgaacgttgctatcagccgtgaacaggcctccgaactgcaaaagaatttggtatggtatgtgaaaactggtgctgggaacaaactccctttggcggacgtacgtgcagcaatgctgctgcgcgccaactcgcatatgcgtggcgcgtccggtatccgtctggagctgatcaaacgtatggaaatcttcttgaacgctggtgttactccgtacgtttatgaatttggatctatcggcgcttctggagatctggtcccgctgagctacattacgggttccctgattggccttgacccgagcttcaaggtggatttcaacggcaaagaaatggacgccccgaccgcgttacgccagttaaatctgtctcccctgacacttctgcctaaagaaggtctagctatgcttaatgggacctcagtcatgactggcatcgcagctaactgcgtatacgacacccagatcctgactgcgattgcaatgggtgttcacgctctggatatccaggccctgaacggcaccaaccagtctttccacccgtttatccataactctaagccgcacccaggtcagctgtgggcggctgatcagatgatatcattgctggctaactcgcaactggtacgggacgagctggacggcaaacatgattaccgcgaccacgagctgatccaggatcgttatagcctgcgttgccttccgcagtacctgggtccgattgtggacggtatctcacagatagcaaaacaaatcgaaattgaaattaactccgttactgataaccctctgattgacgtcgataaccaggcgtcgtaccacggcggaaatttcctgggtcagtatgttggcatgggtatggaccaccttcgctactatatcggcctgctggcgaaacacctggatgtgcagattgcgctgctagctagtcccgaatttagcaacggactgccgccatctttattgggcaaccgtgaacgtaaggttaacatgggtctgaaaggtttacaaatctgtggcaattccatcatgccgctgctgacgttctacggcaatagcatcgccgaccgctttccgacccatgcagagcaattcaaccagaatatcaactctcagggctacacctccgcaacgctggcgcgacgtagtgttgatatcttccaaaactacgttgcgattgccctgatgtttggcgtccaggctgtagacctgaggacttataaaaagactggccattacgatgcgcgtgcttgcctctctccggctaccgaacgcctgtattccgccgtgcgtcacgtagttggtcagaaacctacttcagatcgcccatacatctggaacgataacgagcagggtctggatgaacacatcgctcgcatctccgctgacattgccgctggcggagtaattgttcaagctgtacaggatatcctgccgtgcctgcactaaccggcttatcggtcagtttcacctgatttacgtaaaaacccgcttcggcgggtttttgcttttggaggggcagaaagatgaatgactgtccacgacgctatacccaaaagaaa

SEQ ID NO: 258 - DNA, 5122 bp, synthetic construct
  source 1..5122: mol_type = other DNA
aggctaggtggaggctcagtgatgataagtctgcgatggtggatgcatgtgtcatggtcatagctgtttcctgtgtgaaattgttatccgctcagagggcacaatcctattccgcgctatccgacaatctccaagacattaggtggagttcagttcggcgagcggaaatggcttacgaacggggcggagatttcctggaagatgccaggaagatacttaacagggaagtgagagggccgcggcaaagccgtttttccataggctccgcccccctgacaagcatcacgaaatctgacgctcaaatcagtggtggcgaaacccgacaggactataaagataccaggcgtttccccctggcggctccctcgtgcgctctcctgttcctgcctttcggtttaccggtgtcattccgctgttatggccgcgtttgtctcattccacgcctgacactcagttccgggtaggcagttcgctccaagctggactgtatgcacgaaccccccgttcagtccgaccgctgcgccttatccggtaactatcgtcttgagtccaacccggaaagacatgcaaaagcaccactggcagcagccactggtaattgatttagaggagttagtcttgaagtcatgcgccggttaaggctaaactgaaaggacaagttttggtgactgcgctcctccaagccagttacctcggttcaaagagttggtagctcagagaaccttcgaaaaaccgccctgcaaggcggttttttcgttttcagagcaagagattacgcgcagaccaaaacgatctcaagaagatcatcttattaagtctgacgctctattcaacaaagccgccgtccatgggtagggggcttcaaatcgtcctcgtgataccaattcggagcctgcttttttgtacaaacttgttgataatggcaattcaaggatcttcacctagatccttttaaattaaaaatgaagttttaaatcaatctaaagtatatatgagtaaacttggtctgacagttaccaatgcttaatcagtgaggcacctatctcagcgatctgtctatttcgttcatccatagttgcctgactccccgtcgtgtagataactacgatacgggagggcttaccatctggccccagtgctgcaatgataccgcgagagccacgctcaccggctccagatttatcagcaataaaccagccagccggaagggccgagcgcagaagtggtcctgcaactttatccgcctccatccagtctattaattgttgccgggaagctagagtaagtagttcgccagttaatagtttgcgcaacgttgttgccattgctacaggcatcgtggtgtcacgctcgtcgtttggtatggcttcattcagctccggttcccaacgatcaaggcgagttacatgatcccccatgttgtgcaaaaaagcggttagctccttcggtcctccgatcgttgtcagaagtaagttggccgcagtgttatcactcatggttatggcagcactgcataattctcttactgtcatgccatccgtaagatgcttttctgtgactggtgagtactcaaccaagtcattctgagaatagtgtatgcggcgaccgagttgctcttgcccggcgtcaatacgggataataccgcgccacatagcagaactttaaaagtgctcatcattggaaaacgttcttcggggcgaaaactctcaaggatcttaccgctgttgagatccagttcgatgtaacccactcgtgcacccaactgatcttcagcatcttttactttcaccagcgtttctgggtgagcaaaaacaggaaggcaaaatgccgcaaaaaagggaataagggcgacacggaaatgttgaatactcatactcttcctttttcaatattattgaagcatttatcagggttattgtctcatgagcggatacatatttgaatgtatttagaaaaataaacaaataggggttccgcgcacatttccccgaaaagtgccagatacctgaaacaaaacccatcgtacggccaaggaagtctccaataactgtgatccaccacaagcgccagggttttcccagtcacgacgttgtaaaacgacggccagtcatgcataatccgcacgcatctggaataaggaagtgccattccgcctgacctttgcctatgaggaccaaaacgaaaaaacaccctttcgggtgtcttttctggaatttggtaccgagaggctccatgattcagtatgacttgcctttggtcgaaaaaaaaagcccgcactgtcaggtgcgggcttttttctgtgtttccttattaggacccactttcacatttaagttgtttttctaatccgcatatgatcaattcaaggccgaataagaaggctggctctgcaccttggtgatcaaataattcgatagcttgtcgtaataatggcggcatactatcagtagtaggtgtttccctttcttctttagcgacttgatgctcttgatcttccaatacgcaacctaaagtaaaatgccccacagcgctgagtgcatataatgcattctctagtgaaaaaccttgttggcataaaaaggctaattgattttcgagagtttcatactgtttttctgtaggccgtgtacctaaatgtacttttgctccatcgcgatgacttagtaaagcacatctaaaacttttagcgttattacgtaaaaaatcttgccagctttccccttctaaagggcaaaagtgagtatggtgcctatctaacatctcaatggctaaggcgtcgagcaaagcccgcttattttttacatgccaatacaatgtaggctgctctacacctagcttctgggcgagtttacgggttgttaaaccttcgattccgacctcattaagcagctctaatgcgctgttaatcactttacttttatctaatctggacatattcaccaccctgaattgactctcttccgggcgctatcatgccataccgcgaaaggttttgcgccattcgatggcgcgccgccattgcttgtgcaatgtacatcagagattttgagacacaaccaattattgaaggcctccctaacggggggcctttttttgtttctggtcccccgcttaacgatcgttggctgttttcagcaggacgcactgacctccctatcagtgatagagattgacatccctatcagtgatagagatactgagcacagctgtcaccggatgtgctttccggtctgatgagtccgtgaggacgaaacagcctctacaaataattttgtttaaatcacacgggtaaggaggtatttaaatgaaaacactgtcccaagcacagtcgaagacgagtagccagcagttttctttcaccggtaattctagcgctaacgtgattatcggcaaccagaaactaactatcaacgacgtcgcccgcgttgctcggaacgggaccttagtaagcctgactaacaacactgatatacttcaaggcattcaggcgtcctgtgattatatcaataacgcagttgagtctggtgaaccaatttacggtgtgacctcaggcttcggcggtatggcgaacgttgctatcagccgtgaacaggcctccgaactgcaagagaatattgtatggtcgacgaaaactggtgctgggaacaaactccctttggcggacgtacgtgcagcaatgctgctgcgcgccaactcgcatatgcgtggcgcgtccggtatccgtctggagctgatcaaacgtatggaaatcttcttgaacgctggtgttactccgtacgtttatgaatttggatctatcggcgcttctggagatctggtcccgctgagctacattacgggttccctgattggccttgacccgagcttcaaggtggatttcaacggcaaagaaatggacgccccgaccgcgttacgccagttaaatctgtctcccctgacacttctgcctaaagaaggtattgctatgattaatgggacctcagtcatgactggcatcgcagctaactgcgtatacgacacccagatcctgactgcgattgcaatgggtgttcacgctctggatatccaggccctgaacggcaccaaccagtctttccacccgtttatccataactctaagccgcacccaggtcagctgtgggcggctgatcagatgatatcattgctggctaactcgcaactggtacgggacgagctggacggcaaacatgattaccgcgaccacgagctgatccaggatcgttatagcctgcgttgccttccgcagtacctgggtccgattgtggacggtatctcacagatagcaaaacaaatcgaaattgaaattaactccgttactgataaccctctgattgacgtcgataaccaggcgtcgtaccacggcggaaatttcctgggtcagtatgttggcatgggtatggaccaccttcgctactatatcggcctgctggcgaaacacctggatgtgcagattgcgctgctagctagtcccgaatttagcaacggactgccgccatctttattgggcaaccgtgaacgtaaggttaacatgggtctgaaaggtttacaaatctgtggcaattccatcatgccgctgctgacgttctacggcaatagcatcgccgaccgctttccgacccatgcagagcaattcaaccagaatatcaactctcagggctacacctccgcaacgctggcgcgacgtagtgttgatatcttccaaaactacgttgcgattgccctgatgtttggcgtccaggctgtagacctgaggacttataaaaagactggccattacgatgcgcgtgcttgcctctctccggctaccgaacgcctgtattccgccgtgcgtcacgtagttggtcagaaacctacttcagatcgcccatacatctggaacgataacgagcagggtctggatgaacacatcgctcgcatctccgctgacattgccgctggcggagtaattgttcaagctgtacaggatatcctgccgtgcctgcactaaccggcttatcggtcagtttcacctgatttacgtaaaaacccgcttcggcgggtttttgcttttggaggggcagaaagatgaatgactgtccacgacgctatacccaaaagaaa

SEQ ID NO: 259 - DNA, 5122 bp, synthetic construct
  source 1..5122: mol_type = other DNA
aggctaggtggaggctcagtgatgataagtctgcgatggtggatgcatgtgtcatggtcatagctgtttcctgtgtgaaattgttatccgctcagagggcacaatcctattccgcgctatccgacaatctccaagacattaggtggagttcagttcggcgagcggaaatggcttacgaacggggcggagatttcctggaagatgccaggaagatacttaacagggaagtgagagggccgcggcaaagccgtttttccataggctccgcccccctgacaagcatcacgaaatctgacgctcaaatcagtggtggcgaaacccgacaggactataaagataccaggcgtttccccctggcggctccctcgtgcgctctcctgttcctgcctttcggtttaccggtgtcattccgctgttatggccgcgtttgtctcattccacgcctgacactcagttccgggtaggcagttcgctccaagctggactgtatgcacgaaccccccgttcagtccgaccgctgcgccttatccggtaactatcgtcttgagtccaacccggaaagacatgcaaaagcaccactggcagcagccactggtaattgatttagaggagttagtcttgaagtcatgcgccggttaaggctaaactgaaaggacaagttttggtgactgcgctcctccaagccagttacctcggttcaaagagttggtagctcagagaaccttcgaaaaaccgccctgcaaggcggttttttcgttttcagagcaagagattacgcgcagaccaaaacgatctcaagaagatcatcttattaagtctgacgctctattcaacaaagccgccgtccatgggtagggggcttcaaatcgtcctcgtgataccaattcggagcctgcttttttgtacaaacttgttgataatggcaattcaaggatcttcacctagatccttttaaattaaaaatgaagttttaaatcaatctaaagtatatatgagtaaacttggtctgacagttaccaatgcttaatcagtgaggcacctatctcagcgatctgtctatttcgttcatccatagttgcctgactccccgtcgtgtagataactacgatacgggagggcttaccatctggccccagtgctgcaatgataccgcgagagccacgctcaccggctccagatttatcagcaataaaccagccagccggaagggccgagcgcagaagtggtcctgcaactttatccgcctccatccagtctattaattgttgccgggaagctagagtaagtagttcgccagttaatagtttgcgcaacgttgttgccattgctacaggcatcgtggtgtcacgctcgtcgtttggtatggcttcattcagctccggttcccaacgatcaaggcgagttacatgatcccccatgttgtgcaaaaaagcggttagctccttcggtcctccgatcgttgtcagaagtaagttggccgcagtgttatcactcatggttatggcagcactgcataattctcttactgtcatgccatccgtaagatgcttttctgtgactggtgagtactcaaccaagtcattctgagaatagtgtatgcggcgaccgagttgctcttgcccggcgtcaatacgggataataccgcgccacatagcagaactttaaaagtgctcatcattggaaaacgttcttcggggcgaaaactctcaaggatcttaccgctgttgagatccagttcgatgtaacccactcgtgcacccaactgatcttcagcatcttttactttcaccagcgtttctgggtgagcaaaaacaggaaggcaaaatgccgcaaaaaagggaataagggcgacacggaaatgttgaatactcatactcttcctttttcaatattattgaagcatttatcagggttattgtctcatgagcggatacatatttgaatgtatttagaaaaataaacaaataggggttccgcgcacatttccccgaaaagtgccagatacctgaaacaaaacccatcgtacggccaaggaagtctccaataactgtgatccaccacaagcgccagggttttcccagtcacgacgttgtaaaacgacggccagtcatgcataatccgcacgcatctggaataaggaagtgccattccgcctgacctttgcctatgaggaccaaaacgaaaaaacaccctttcgggtgtcttttctggaatttggtaccgagaggctccatgattcagtatgacttgcctttggtcgaaaaaaaaagcccgcactgtcaggtgcgggcttttttctgtgtttccttattaggacccactttcacatttaagttgtttttctaatccgcatatgatcaattcaaggccgaataagaaggctggctctgcaccttggtgatcaaataattcgatagcttgtcgtaataatggcggcatactatcagtagtaggtgtttccctttcttctttagcgacttgatgctcttgatcttccaatacgcaacctaaagtaaaatgccccacagcgctgagtgcatataatgcattctctagtgaaaaaccttgttggcataaaaaggctaattgattttcgagagtttcatactgtttttctgtaggccgtgtacctaaatgtacttttgctccatcgcgatgacttagtaaagcacatctaaaacttttagcgttattacgtaaaaaatcttgccagctttccccttctaaagggcaaaagtgagtatggtgcctatctaacatctcaatggctaaggcgtcgagcaaagcccgcttattttttacatgccaatacaatgtaggctgctctacacctagcttctgggcgagtttacgggttgttaaaccttcgattccgacctcattaagcagctctaatgcgctgttaatcactttacttttatctaatctggacatattcaccaccctgaattgactctcttccgggcgctatcatgccataccgcgaaaggttttgcgccattcgatggcgcgccgccattgcttgtgcaatgtacatcagagattttgagacacaaccaattattgaaggcctccctaacggggggcctttttttgtttctggtcccccgcttaacgatcgttggctgttttcagcaggacgcactgacctccctatcagtgatagagattgacatccctatcagtgatagagatactgagcacagctgtcaccggatgtgctttccggtctgatgagtccgtgaggacgaaacagcctctacaaataattttgtttaaatcacacgggtaaggaggtatttaaatgaaaacactgtcccaagcacagtcgaagacgagtagccagcagttttctttcaccggtaattctagcgctaacgtgattatcggcaaccagaaactaactatcaacgacgtcgcccgcgttgctcggaacgggaccttagtaagcctgactaacaacactgatatacttcaaggcattcaggcgtcctgtgattatatcaataacgcagttgagtctggtgaaccaatttacggtgtgacctcaggcttcggcggtatggcgaacgttgctatcagccgtgaacaggcctccgaactgcaaaccaatattgtatggcacctgaaaactggtgctgggaacaaactccctttggcggacgtacgtgcagcaatgctgctgcgcgccaactcgcatatgcgtggcgcgtccggtatccgtctggagctgatcaaacgtatggaaatcttcttgaacgctggtgttactccgtacgtttatgaatttggatctatcggcgcttctggagatctggtcccgctgagctacattacgggttccctgattggccttgacccgagcttcaaggtggatttcaacggcaaagaaatggacgccccgaccgcgttacgccagttaaatctgtctcccctgacacttctgcctaaagaaggtattgctatgatgaatgggacctcagtcatgactggcatcgcagctaactgcgtatacgacacccagatcctgactgcgattgcaatgggtgttcacgctctggatatccaggccctgaacggcaccaaccagtctttccacccgtttatccataactctaagccgcacccaggtcagctgtgggcggctgatcagatgatatcattgctggctaactcgcaactggtacgggacgagctggacggcaaacatgattaccgcgaccacgagctgatccaggatcgttatagcctgcgttgccttccgcagtacctgggtccgattgtggacggtatctcacagatagcaaaacaaatcgaaattgaaattaactccgttactgataaccctctgattgacgtcgataaccaggcgtcgtaccacggcggaaatttcctgggtcagtatgttggcatgggtatggaccaccttcgctactatatcggcctgctggcgaaacacctggatgtgcagattgcgctgctagctagtcccgaatttagcaacggactgccgccatctttattgggcaaccgtgaacgtaaggttaacatgggtctgaaaggtttacaaatctgtggcaattccatcatgccgctgctgacgttctacggcaatagcatcgccgaccgctttccgacccatgcagagcaattcaaccagaatatcaactctcagggctacacctccgcaacgctggcgcgacgtagtgttgatatcttccaaaactacgttgcgattgccctgatgtttggcgtccaggctgtagacctgaggacttataaaaagactggccattacgatgcgcgtgcttgcctctctccggctaccgaacgcctgtattccgccgtgcgtcacgtagttggtcagaaacctacttcagatcgcccatacatctggaacgataacgagcagggtctggatgaacacatcgctcgcatctccgctgacattgccgctggcggagtaattgttcaagctgtacaggatatcctgccgtgcctgcactaaccggcttatcggtcagtttcacctgatttacgtaaaaacccgcttcggcgggtttttgcttttggaggggcagaaagatgaatgactgtccacgacgctatacccaaaagaaa

SEQ ID NO: 260 - DNA, 5122 bp, synthetic construct
  source 1..5122: mol_type = other DNA
aggctaggtggaggctcagtgatgataagtctgcgatggtggatgcatgtgtcatggtcatagctgtttcctgtgtgaaattgttatccgctcagagggcacaatcctattccgcgctatccgacaatctccaagacattaggtggagttcagttcggcgagcggaaatggcttacgaacggggcggagatttcctggaagatgccaggaagatacttaacagggaagtgagagggccgcggcaaagccgtttttccataggctccgcccccctgacaagcatcacgaaatctgacgctcaaatcagtggtggcgaaacccgacaggactataaagataccaggcgtttccccctggcggctccctcgtgcgctctcctgttcctgcctttcggtttaccggtgtcattccgctgttatggccgcgtttgtctcattccacgcctgacactcagttccgggtaggcagttcgctccaagctggactgtatgcacgaaccccccgttcagtccgaccgctgcgccttatccggtaactatcgtcttgagtccaacccggaaagacatgcaaaagcaccactggcagcagccactggtaattgatttagaggagttagtcttgaagtcatgcgccggttaaggctaaactgaaaggacaagttttggtgactgcgctcctccaagccagttacctcggttcaaagagttggtagctcagagaaccttcgaaaaaccgccctgcaaggcggttttttcgttttcagagcaagagattacgcgcagaccaaaacgatctcaagaagatcatcttattaagtctgacgctctattcaacaaagccgccgtccatgggtagggggcttcaaatcgtcctcgtgataccaattcggagcctgcttttttgtacaaacttgttgataatggcaattcaaggatcttcacctagatccttttaaattaaaaatgaagttttaaatcaatctaaagtatatatgagtaaacttggtctgacagttaccaatgcttaatcagtgaggcacctatctcagcgatctgtctatttcgttcatccatagttgcctgactccccgtcgtgtagataactacgatacgggagggcttaccatctggccccagtgctgcaatgataccgcgagagccacgctcaccggctccagatttatcagcaataaaccagccagccggaagggccgagcgcagaagtggtcctgcaactttatccgcctccatccagtctattaattgttgccgggaagctagagtaagtagttcgccagttaatagtttgcgcaacgttgttgccattgctacaggcatcgtggtgtcacgctcgtcgtttggtatggcttcattcagctccggttcccaacgatcaaggcgagttacatgatcccccatgttgtgcaaaaaagcggttagctccttcggtcctccgatcgttgtcagaagtaagttggccgcagtgttatcactcatggttatggcagcactgcataattctcttactgtcatgccatccgtaagatgcttttctgtgactggtgagtactcaaccaagtcattctgagaatagtgtatgcggcgaccgagttgctcttgcccggcgtcaatacgggataataccgcgccacatagcagaactttaaaagtgctcatcattggaaaacgttcttcggggcgaaaactctcaaggatcttaccgctgttgagatccagttcgatgtaacccactcgtgcacccaactgatcttcagcatcttttactttcaccagcgtttctgggtgagcaaaaacaggaaggcaaaatgccgcaaaaaagggaataagggcgacacggaaatgttgaatactcatactcttcctttttcaatattattgaagcatttatcagggttattgtctcatgagcggatacatatttgaatgtatttagaaaaataaacaaataggggttccgcgcacatttccccgaaaagtgccagatacctgaaacaaaacccatcgtacggccaaggaagtctccaataactgtgatccaccacaagcgccagggttttcccagtcacgacgttgtaaaacgacggccagtcatgcataatccgcacgcatctggaataaggaagtgccattccgcctgacctttgcctatgaggaccaaaacgaaaaaacaccctttcgggtgtcttttctggaatttggtaccgagaggctccatgattcagtatgacttgcctttggtcgaaaaaaaaagcccgcactgtcaggtgcgggcttttttctgtgtttccttattaggacccactttcacatttaagttgtttttctaatccgcatatgatcaattcaaggccgaataagaaggctggctctgcaccttggtgatcaaataattcgatagcttgtcgtaataatggcggcatactatcagtagtaggtgtttccctttcttctttagcgacttgatgctcttgatcttccaatacgcaacctaaagtaaaatgccccacagcgctgagtgcatataatgcattctctagtgaaaaaccttgttggcataaaaaggctaattgattttcgagagtttcatactgtttttctgtaggccgtgtacctaaatgtacttttgctccatcgcgatgacttagtaaagcacatctaaaacttttagcgttattacgtaaaaaatcttgccagctttccccttctaaagggcaaaagtgagtatggtgcctatctaacatctcaatggctaaggcgtcgagcaaagcccgcttattttttacatgccaatacaatgtaggctgctctacacctagcttctgggcgagtttacgggttgttaaaccttcgattccgacctcattaagcagctctaatgcgctgttaatcactttacttttatctaatctggacatattcaccaccctgaattgactctcttccgggcgctatcatgccataccgcgaaaggttttgcgccattcgatggcgcgccgccattgcttgtgcaatgtacatcagagattttgagacacaaccaattattgaaggcctccctaacggggggcctttttttgtttctggtcccccgcttaacgatcgttggctgttttcagcaggacgcactgacctccctatcagtgatagagattgacatccctatcagtgatagagatactgagcacagctgtcaccggatgtgctttccggtctgatgagtccgtgaggacgaaacagcctctacaaataattttgtttaaatcacacgggtaaggaggtatttaaatgaaaacactgtcccaagcacagtcgaagacgagtagccagcagttttctttcaccggtaattctagcgctaacgtgattatcggcaaccagaaactaactatcaacgacgtcgcccgcgttgctcggaacgggaccttagtaagcctgactaacaacactgatatacttcaaggcattcaggcgtcctgtgattatatcaataacgcagttgagtctggtgaaccaatttacggtgtgacctcaggcttcggcggtatggcgaacgttgctatcagccgtgaacaggcctccgaactgcaaagtaatattgtatggtcgctgaaaactggtgctgggaacaaactccctttggcggacgtacgtgcagcaatgctgctgcgcgccaactcgcatatgcgtggcgcgtccggtatccgtctggagctgatcaaacgtatggaaatcttcttgaacgctggtgttactccgtacgtttatgaatttggatctatcggcgcttctggagatctggtcccgctgagctacattacgggttccctgattggccttgacccgagcttcaaggtggatttcaacggcaaagaaatggacgccccgaccgcgttacgccagttaaatctgtctcccctgacacttctgcctaaagaaagtatagctatggtgaatgggacctcagtcatgactggcatcgcagctaactgcgtatacgacacccagatcctgactgcgattgcaatgggtgttcacgctctggatatccaggccctgaacggcaccaaccagtctttccacccgtttatccataactctaagccgcacccaggtcagctgtgggcggctgatcagatgatatcattgctggctaactcgcaactggtacgggacgagctggacggcaaacatgattaccgcgaccacgagctgatccaggatcgttatagcctgcgttgccttccgcagtacctgggtccgattgtggacggtatctcacagatagcaaaacaaatcgaaattgaaattaactccgttactgataaccctctgattgacgtcgataaccaggcgtcgtaccacggcggaaatttcctgggtcagtatgttggcatgggtatggaccaccttcgctactatatcggcctgctggcgaaacacctggatgtgcagattgcgctgctagctagtcccgaatttagcaacggactgccgccatctttattgggcaaccgtgaacgtaaggttaacatgggtctgaaaggtttacaaatctgtggcaattccatcatgccgctgctgacgttctacggcaatagcatcgccgaccgctttccgacccatgcagagcaattcaaccagaatatcaactctcagggctacacctccgcaacgctggcgcgacgtagtgttgatatcttccaaaactacgttgcgattgccctgatgtttggcgtccaggctgtagacctgaggacttataaaaagactggccattacgatgcgcgtgcttgcctctctccggctaccgaacgcctgtattccgccgtgcgtcacgtagttggtcagaaacctacttcagatcgcccatacatctggaacgataacgagcagggtctggatgaacacatcgctcgcatctccgctgacattgccgctggcggagtaattgttcaagctgtacaggatatcctgccgtgcctgcactaaccggcttatcggtcagtttcacctgatttacgtaaaaacccgcttcggcgggtttttgcttttggaggggcagaaagatgaatgactgtccacgacgctatacccaaaagaaa

SEQ ID NO: 261 - DNA, 5122 bp, synthetic construct
  source 1..5122: mol_type = other DNA
aggctaggtggaggctcagtgatgataagtctgcgatggtggatgcatgtgtcatggtcatagctgtttcctgtgtgaaattgttatccgctcagagggcacaatcctattccgcgctatccgacaatctccaagacattaggtggagttcagttcggcgagcggaaatggcttacgaacggggcggagatttcctggaagatgccaggaagatacttaacagggaagtgagagggccgcggcaaagccgtttttccataggctccgcccccctgacaagcatcacgaaatctgacgctcaaatcagtggtggcgaaacccgacaggactataaagataccaggcgtttccccctggcggctccctcgtgcgctctcctgttcctgcctttcggtttaccggtgtcattccgctgttatggccgcgtttgtctcattccacgcctgacactcagttccgggtaggcagttcgctccaagctggactgtatgcacgaaccccccgttcagtccgaccgctgcgccttatccggtaactatcgtcttgagtccaacccggaaagacatgcaaaagcaccactggcagcagccactggtaattgatttagaggagttagtcttgaagtcatgcgccggttaaggctaaactgaaaggacaagttttggtgactgcgctcctccaagccagttacctcggttcaaagagttggtagctcagagaaccttcgaaaaaccgccctgcaaggcggttttttcgttttcagagcaagagattacgcgcagaccaaaacgatctcaagaagatcatcttattaagtctgacgctctattcaacaaagccgccgtccatgggtagggggcttcaaatcgtcctcgtgataccaattcggagcctgcttttttgtacaaacttgttgataatggcaattcaaggatcttcacctagatccttttaaattaaaaatgaagttttaaatcaatctaaagtatatatgagtaaacttggtctgacagttaccaatgcttaatcagtgaggcacctatctcagcgatctgtctatttcgttcatccatagttgcctgactccccgtcgtgtagataactacgatacgggagggcttaccatctggccccagtgctgcaatgataccgcgagagccacgctcaccggctccagatttatcagcaataaaccagccagccggaagggccgagcgcagaagtggtcctgcaactttatccgcctccatccagtctattaattgttgccgggaagctagagtaagtagttcgccagttaatagtttgcgcaacgttgttgccattgctacaggcatcgtggtgtcacgctcgtcgtttggtatggcttcattcagctccggttcccaacgatcaaggcgagttacatgatcccccatgttgtgcaaaaaagcggttagctccttcggtcctccgatcgttgtcagaagtaagttggccgcagtgttatcactcatggttatggcagcactgcataattctcttactgtcatgccatccgtaagatgcttttctgtgactggtgagtactcaaccaagtcattctgagaatagtgtatgcggcgaccgagttgctcttgcccggcgtcaatacgggataataccgcgccacatagcagaactttaaaagtgctcatcattggaaaacgttcttcggggcgaaaactctcaaggatcttaccgctgttgagatccagttcgatgtaacccactcgtgcacccaactgatcttcagcatcttttactttcaccagcgtttctgggtgagcaaaaacaggaaggcaaaatgccgcaaaaaagggaataagggcgacacggaaatgttgaatactcatactcttcctttttcaatattattgaagcatttatcagggttattgtctcatgagcggatacatatttgaatgtatttagaaaaataaacaaataggggttccgcgcacatttccccgaaaagtgccagatacctgaaacaaaacccatcgtacggccaaggaagtctccaataactgtgatccaccacaagcgccagggttttcccagtcacgacgttgtaaaacgacggccagtcatgcataatccgcacgcatctggaataaggaagtgccattccgcctgacctttgcctatgaggaccaaaacgaaaaaacaccctttcgggtgtcttttctggaatttggtaccgagaggctccatgattcagtatgacttgcctttggtcgaaaaaaaaagcccgcactgtcaggtgcgggcttttttctgtgtttccttattaggacccactttcacatttaagttgtttttctaatccgcatatgatcaattcaaggccgaataagaaggctggctctgcaccttggtgatcaaataattcgatagcttgtcgtaataatggcggcatactatcagtagtaggtgtttccctttcttctttagcgacttgatgctcttgatcttccaatacgcaacctaaagtaaaatgccccacagcgctgagtgcatataatgcattctctagtgaaaaaccttgttggcataaaaaggctaattgattttcgagagtttcatactgtttttctgtaggccgtgtacctaaatgtacttttgctccatcgcgatgacttagtaaagcacatctaaaacttttagcgttattacgtaaaaaatcttgccagctttccccttctaaagggcaaaagtgagtatggtgcctatctaacatctcaatggctaaggcgtcgagcaaagcccgcttattttttacatgccaatacaatgtaggctgctctacacctagcttctgggcgagtttacgggttgttaaaccttcgattccgacctcattaagcagctctaatgcgctgttaatcactttacttttatctaatctggacatattcaccaccctgaattgactctcttccgggcgctatcatgccataccgcgaaaggttttgcgccattcgatggcgcgccgccattgcttgtgcaatgtacatcagagattttgagacacaaccaattattgaaggcctccctaacggggggcctttttttgtttctggtcccccgcttaacgatcgttggctgttttcagcaggacgcactgacctccctatcagtgatagagattgacatccctatcagtgatagagatactgagcacagctgtcaccggatgtgctttccggtctgatgagtccgtgaggacgaaacagcctctacaaataattttgtttaaatcacacgggtaaggaggtatttaaatgaaaacactgtcccaagcacagtcgaagacgagtagccagcagttttctttcaccggtaattctagcgctaacgtgattatcggcaaccagaaactaactatcaacgacgtcgcccgcgttgctcggaacgggaccttagtaagcctgactaacaacactgatatacttcaaggcattcaggcgtcctgtgattatatcaataacgcagttgagtctggtgaaccaatttacggtgtgacctcaggcttcggcggtatggcgaacgttgctatcagccgtgaacaggcctccgaactgcaacacaatatggtatggtatacaaaaactggtgctgggaacaaactccctttggcggacgtacgtgcagcaatgctgctgcgcgccaactcgcatatgcgtggcgcgtccggtatccgtctggagctgatcaaacgtatggaaatcttcttgaacgctggtgttactccgtacgtttatgaatttggatctatcggcgcttctggagatctggtcccgctgagctacattacgggttccctgattggccttgacccgagcttcaaggtggatttcaacggcaaagaaatggacgccccgaccgcgttacgccagttaaatctgtctcccctgacacttctgcctaaagaaagtctagctatgctcaatgggacctcagtcatgactggcatcgcagctaactgcgtatacgacacccagatcctgactgcgattgcaatgggtgttcacgctctggatatccaggccctgaacggcaccaaccagtctttccacccgtttatccataactctaagccgcacccaggtcagctgtgggcggctgatcagatgatatcattgctggctaactcgcaactggtacgggacgagctggacggcaaacatgattaccgcgaccacgagctgatccaggatcgttatagcctgcgttgccttccgcagtacctgggtccgattgtggacggtatctcacagatagcaaaacaaatcgaaattgaaattaactccgttactgataaccctctgattgacgtcgataaccaggcgtcgtaccacggcggaaatttcctgggtcagtatgttggcatgggtatggaccaccttcgctactatatcggcctgctggcgaaacacctggatgtgcagattgcgctgctagctagtcccgaatttagcaacggactgccgccatctttattgggcaaccgtgaacgtaaggttaacatgggtctgaaaggtttacaaatctgtggcaattccatcatgccgctgctgacgttctacggcaatagcatcgccgaccgctttccgacccatgcagagcaattcaaccagaatatcaactctcagggctacacctccgcaacgctggcgcgacgtagtgttgatatcttccaaaactacgttgcgattgccctgatgtttggcgtccaggctgtagacctgaggacttataaaaagactggccattacgatgcgcgtgcttgcctctctccggctaccgaacgcctgtattccgccgtgcgtcacgtagttggtcagaaacctacttcagatcgcccatacatctggaacgataacgagcagggtctggatgaacacatcgctcgcatctccgctgacattgccgctggcggagtaattgttcaagctgtacaggatatcctgccgtgcctgcactaaccggcttatcggtcagtttcacctgatttacgtaaaaacccgcttcggcgggtttttgcttttggaggggcagaaagatgaatgactgtccacgacgctatacccaaaagaaa

SEQ ID NO: 262 - DNA, 5122 bp, synthetic construct
  source 1..5122: mol_type = other DNA
aggctaggtggaggctcagtgatgataagtctgcgatggtggatgcatgtgtcatggtcatagctgtttcctgtgtgaaattgttatccgctcagagggcacaatcctattccgcgctatccgacaatctccaagacattaggtggagttcagttcggcgagcggaaatggcttacgaacggggcggagatttcctggaagatgccaggaagatacttaacagggaagtgagagggccgcggcaaagccgtttttccataggctccgcccccctgacaagcatcacgaaatctgacgctcaaatcagtggtggcgaaacccgacaggactataaagataccaggcgtttccccctggcggctccctcgtgcgctctcctgttcctgcctttcggtttaccggtgtcattccgctgttatggccgcgtttgtctcattccacgcctgacactcagttccgggtaggcagttcgctccaagctggactgtatgcacgaaccccccgttcagtccgaccgctgcgccttatccggtaactatcgtcttgagtccaacccggaaagacatgcaaaagcaccactggcagcagccactggtaattgatttagaggagttagtcttgaagtcatgcgccggttaaggctaaactgaaaggacaagttttggtgactgcgctcctccaagccagttacctcggttcaaagagttggtagctcagagaaccttcgaaaaaccgccctgcaaggcggttttttcgttttcagagcaagagattacgcgcagaccaaaacgatctcaagaagatcatcttattaagtctgacgctctattcaacaaagccgccgtccatgggtagggggcttcaaatcgtcctcgtgataccaattcggagcctgcttttttgtacaaacttgttgataatggcaattcaaggatcttcacctagatccttttaaattaaaaatgaagttttaaatcaatctaaagtatatatgagtaaacttggtctgacagttaccaatgcttaatcagtgaggcacctatctcagcgatctgtctatttcgttcatccatagttgcctgactccccgtcgtgtagataactacgatacgggagggcttaccatctggccccagtgctgcaatgataccgcgagagccacgctcaccggctccagatttatcagcaataaaccagccagccggaagggccgagcgcagaagtggtcctgcaactttatccgcctccatccagtctattaattgttgccgggaagctagagtaagtagttcgccagttaatagtttgcgcaacgttgttgccattgctacaggcatcgtggtgtcacgctcgtcgtttggtatggcttcattcagctccggttcccaacgatcaaggcgagttacatgatcccccatgttgtgcaaaaaagcggttagctccttcggtcctccgatcgttgtcagaagtaagttggccgcagtgttatcactcatggttatggcagcactgcataattctcttactgtcatgccatccgtaagatgcttttctgtgactggtgagtactcaaccaagtcattctgagaatagtgtatgcggcgaccgagttgctcttgcccggcgtcaatacgggataataccgcgccacatagcagaactttaaaagtgctcatcattggaaaacgttcttcggggcgaaaactctcaaggatcttaccgctgttgagatccagttcgatgtaacccactcgtgcacccaactgatcttcagcatcttttactttcaccagcgtttctgggtgagcaaaaacaggaaggcaaaatgccgcaaaaaagggaataagggcgacacggaaatgttgaatactcatactcttcctttttcaatattattgaagcatttatcagggttattgtctcatgagcggatacatatttgaatgtatttagaaaaataaacaaataggggttccgcgcacatttccccgaaaagtgccagatacctgaaacaaaacccatcgtacggccaaggaagtctccaataactgtgatccaccacaagcgccagggttttcccagtcacgacgttgtaaaacgacggccagtcatgcataatccgcacgcatctggaataaggaagtgccattccgcctgacctttgcctatgaggaccaaaacgaaaaaacaccctttcgggtgtcttttctggaatttggtaccgagaggctccatgattcagtatgacttgcctttggtcgaaaaaaaaagcccgcactgtcaggtgcgggcttttttctgtgtttccttattaggacccactttcacatttaagttgtttttctaatccgcatatgatcaattcaaggccgaataagaaggctggctctgcaccttggtgatcaaataattcgatagcttgtcgtaataatggcggcatactatcagtagtaggtgtttccctttcttctttagcgacttgatgctcttgatcttccaatacgcaacctaaagtaaaatgccccacagcgctgagtgcatataatgcattctctagtgaaaaaccttgttggcataaaaaggctaattgattttcgagagtttcatactgtttttctgtaggccgtgtacctaaatgtacttttgctccatcgcgatgacttagtaaagcacatctaaaacttttagcgttattacgtaaaaaatcttgccagctttccccttctaaagggcaaaagtgagtatggtgcctatctaacatctcaatggctaaggcgtcgagcaaagcccgcttattttttacatgccaatacaatgtaggctgctctacacctagcttctgggcgagtttacgggttgttaaaccttcgattccgacctcattaagcagctctaatgcgctgttaatcactttacttttatctaatctggacatattcaccaccctgaattgactctcttccgggcgctatcatgccataccgcgaaaggttttgcgccattcgatggcgcgccgccattgcttgtgcaatgtacatcagagattttgagacacaaccaattattgaaggcctccctaacggggggcctttttttgtttctggtcccccgcttaacgatcgttggctgttttcagcaggacgcactgacctccctatcagtgatagagattgacatccctatcagtgatagagatactgagcacagctgtcaccggatgtgctttccggtctgatgagtccgtgaggacgaaacagcctctacaaataattttgtttaaatcacacgggtaaggaggtatttaaatgaaaacactgtcccaagcacagtcgaagacgagtagccagcagttttctttcaccggtaattctagcgctaacgtgattatcggcaaccagaaactaactatcaacgacgtcgcccgcgttgctcggaacgggaccttagtaagcctgactaacaacactgatatacttcaaggcattcaggcgtcctgtgattatatcaataacgcagttgagtctggtgaaccaatttacggtgtgacctcaggcttcggcggtatggcgaacgttgctatcagccgtgaacaggcctccgaactgcaaaccaatatggtatggtatacaaaaactggtgctgggaacaaactccctttggcggacgtacgtgcagcaatgctgctgcgcgccaactcgcatatgcgtggcgcgtccggtatccgtctggagctgatcaaacgtatggaaatcttcttgaacgctggtgttactccgtacgtttatgaatttggatctatcggcgcttctggagatctggtcccgctgagctacattacgggttccctgattggccttgacccgagcttcaaggtggatttcaacggcaaagaaatggacgccccgaccgcgttacgccagttaaatctgtctcccctgacacttctgcctaaagaaggtctagctatgcttaatgggacctcagtcatgactggcatcgcagctaactgcgtatacgacacccagatcctgactgcgattgcaatgggtgttcacgctctggatatccaggccctgaacggcaccaaccagtctttccacccgtttatccataactctaagccgcacccaggtcagctgtgggcggctgatcagatgatatcattgctggctaactcgcaactggtacgggacgagctggacggcaaacatgattaccgcgaccacgagctgatccaggatcgttatagcctgcgttgccttccgcagtacctgggtccgattgtggacggtatctcacagatagcaaaacaaatcgaaattgaaattaactccgttactgataaccctctgattgacgtcgataaccaggcgtcgtaccacggcggaaatttcctgggtcagtatgttggcatgggtatggaccaccttcgctactatatcggcctgctggcgaaacacctggatgtgcagattgcgctgctagctagtcccgaatttagcaacggactgccgccatctttattgggcaaccgtgaacgtaaggttaacatgggtctgaaaggtttacaaatctgtggcaattccatcatgccgctgctgacgttctacggcaatagcatcgccgaccgctttccgacccatgcagagcaattcaaccagaatatcaactctcagggctacacctccgcaacgctggcgcgacgtagtgttgatatcttccaaaactacgttgcgattgccctgatgtttggcgtccaggctgtagacctgaggacttataaaaagactggccattacgatgcgcgtgcttgcctctctccggctaccgaacgcctgtattccgccgtgcgtcacgtagttggtcagaaacctacttcagatcgcccatacatctggaacgataacgagcagggtctggatgaacacatcgctcgcatctccgctgacattgccgctggcggagtaattgttcaagctgtacaggatatcctgccgtgcctgcactaaccggcttatcggtcagtttcacctgatttacgtaaaaacccgcttcggcgggtttttgcttttggaggggcagaaagatgaatgactgtccacgacgctatacccaaaagaaa

SEQ ID NO: 263 - DNA, 5122 bp, synthetic construct
  source 1..5122: mol_type = other DNA
aggctaggtggaggctcagtgatgataagtctgcgatggtggatgcatgtgtcatggtcatagctgtttcctgtgtgaaattgttatccgctcagagggcacaatcctattccgcgctatccgacaatctccaagacattaggtggagttcagttcggcgagcggaaatggcttacgaacggggcggagatttcctggaagatgccaggaagatacttaacagggaagtgagagggccgcggcaaagccgtttttccataggctccgcccccctgacaagcatcacgaaatctgacgctcaaatcagtggtggcgaaacccgacaggactataaagataccaggcgtttccccctggcggctccctcgtgcgctctcctgttcctgcctttcggtttaccggtgtcattccgctgttatggccgcgtttgtctcattccacgcctgacactcagttccgggtaggcagttcgctccaagctggactgtatgcacgaaccccccgttcagtccgaccgctgcgccttatccggtaactatcgtcttgagtccaacccggaaagacatgcaaaagcaccactggcagcagccactggtaattgatttagaggagttagtcttgaagtcatgcgccggttaaggctaaactgaaaggacaagttttggtgactgcgctcctccaagccagttacctcggttcaaagagttggtagctcagagaaccttcgaaaaaccgccctgcaaggcggttttttcgttttcagagcaagagattacgcgcagaccaaaacgatctcaagaagatcatcttattaagtctgacgctctattcaacaaagccgccgtccatgggtagggggcttcaaatcgtcctcgtgataccaattcggagcctgcttttttgtacaaacttgttgataatggcaattcaaggatcttcacctagatccttttaaattaaaaatgaagttttaaatcaatctaaagtatatatgagtaaacttggtctgacagttaccaatgcttaatcagtgaggcacctatctcagcgatctgtctatttcgttcatccatagttgcctgactccccgtcgtgtagataactacgatacgggagggcttaccatctggccccagtgctgcaatgataccgcgagagccacgctcaccggctccagatttatcagcaataaaccagccagccggaagggccgagcgcagaagtggtcctgcaactttatccgcctccatccagtctattaattgttgccgggaagctagagtaagtagttcgccagttaatagtttgcgcaacgttgttgccattgctacaggcatcgtggtgtcacgctcgtcgtttggtatggcttcattcagctccggttcccaacgatcaaggcgagttacatgatcccccatgttgtgcaaaaaagcggttagctccttcggtcctccgatcgttgtcagaagtaagttggccgcagtgttatcactcatggttatggcagcactgcataattctcttactgtcatgccatccgtaagatgcttttctgtgactggtgagtactcaaccaagtcattctgagaatagtgtatgcggcgaccgagttgctcttgcccggcgtcaatacgggataataccgcgccacatagcagaactttaaaagtgctcatcattggaaaacgttcttcggggcgaaaactctcaaggatcttaccgctgttgagatccagttcgatgtaacccactcgtgcacccaactgatcttcagcatcttttactttcaccagcgtttctgggtgagcaaaaacaggaaggcaaaatgccgcaaaaaagggaataagggcgacacggaaatgttgaatactcatactcttcctttttcaatattattgaagcatttatcagggttattgtctcatgagcggatacatatttgaatgtatttagaaaaataaacaaataggggttccgcgcacatttccccgaaaagtgccagatacctgaaacaaaacccatcgtacggccaaggaagtctccaataactgtgatccaccacaagcgccagggttttcccagtcacgacgttgtaaaacgacggccagtcatgcataatccgcacgcatctggaataaggaagtgccattccgcctgacctttgcctatgaggaccaaaacgaaaaaacaccctttcgggtgtcttttctggaatttggtaccgagaggctccatgattcagtatgacttgcctttggtcgaaaaaaaaagcccgcactgtcaggtgcgggcttttttctgtgtttccttattaggacccactttcacatttaagttgtttttctaatccgcatatgatcaattcaaggccgaataagaaggctggctctgcaccttggtgatcaaataattcgatagcttgtcgtaataatggcggcatactatcagtagtaggtgtttccctttcttctttagcgacttgatgctcttgatcttccaatacgcaacctaaagtaaaatgccccacagcgctgagtgcatataatgcattctctagtgaaaaaccttgttggcataaaaaggctaattgattttcgagagtttcatactgtttttctgtaggccgtgtacctaaatgtacttttgctccatcgcgatgacttagtaaagcacatctaaaacttttagcgttattacgtaaaaaatcttgccagctttccccttctaaagggcaaaagtgagtatggtgcctatctaacatctcaatggctaaggcgtcgagcaaagcccgcttattttttacatgccaatacaatgtaggctgctctacacctagcttctgggcgagtttacgggttgttaaaccttcgattccgacctcattaagcagctctaatgcgctgttaatcactttacttttatctaatctggacatattcaccaccctgaattgactctcttccgggcgctatcatgccataccgcgaaaggttttgcgccattcgatggcgcgccgccattgcttgtgcaatgtacatcagagattttgagacacaaccaattattgaaggcctccctaacggggggcctttttttgtttctggtcccccgcttaacgatcgttggctgttttcagcaggacgcactgacctccctatcagtgatagagattgacatccctatcagtgatagagatactgagcacagctgtcaccggatgtgctttccggtctgatgagtccgtgaggacgaaacagcctctacaaataattttgtttaaatcacacgggtaaggaggtatttaaatgaaaacactgtcccaagcacagtcgaagacgagtagccagcagttttctttcaccggtaattctagcgctaacgtgattatcggcaaccagaaactaactatcaacgacgtcgcccgcgttgctcggaacgggaccttagtaagcctgactaacaacactgatatacttcaaggcattcaggcgtcctgtgattatatcaataacgcagttgagtctggtgaaccaatttacggtgtgacctcaggcttcggcggtatggcgaacgttgctatcagccgtgaacaggcctccgaactgcaagagaatttggtatggtatatgaaaactggtgctgggaacaaactccctttggcggacgtacgtgcagcaatgctgctgcgcgccaactcgcatatgcgtggcgcgtccggtatccgtctggagctgatcaaacgtatggaaatcttcttgaacgctggtgttactccgtacgtttatgaatttggatctatcggcgcttctggagatctggtcccgctgagctacattacgggttccctgattggccttgacccgagcttcaaggtggatttcaacggcaaagaaatggacgccccgaccgcgttacgccagttaaatctgtctcccctgacacttctgcctaaagaaggtctagctatgaccaatgggacctcagtcatgactggcatcgcagctaactgcgtatacgacacccagatcctgactgcgattgcaatgggtgttcacgctctggatatccaggccctgaacggcaccaaccagtctttccacccgtttatccataactctaagccgcacccaggtcagctgtgggcggctgatcagatgatatcattgctggctaactcgcaactggtacgggacgagctggacggcaaacatgattaccgcgaccacgagctgatccaggatcgttatagcctgcgttgccttccgcagtacctgggtccgattgtggacggtatctcacagatagcaaaacaaatcgaaattgaaattaactccgttactgataaccctctgattgacgtcgataaccaggcgtcgtaccacggcggaaatttcctgggtcagtatgttggcatgggtatggaccaccttcgctactatatcggcctgctggcgaaacacctggatgtgcagattgcgctgctagctagtcccgaatttagcaacggactgccgccatctttattgggcaaccgtgaacgtaaggttaacatgggtctgaaaggtttacaaatctgtggcaattccatcatgccgctgctgacgttctacggcaatagcatcgccgaccgctttccgacccatgcagagcaattcaaccagaatatcaactctcagggctacacctccgcaacgctggcgcgacgtagtgttgatatcttccaaaactacgttgcgattgccctgatgtttggcgtccaggctgtagacctgaggacttataaaaagactggccattacgatgcgcgtgcttgcctctctccggctaccgaacgcctgtattccgccgtgcgtcacgtagttggtcagaaacctacttcagatcgcccatacatctggaacgataacgagcagggtctggatgaacacatcgctcgcatctccgctgacattgccgctggcggagtaattgttcaagctgtacaggatatcctgccgtgcctgcactaaccggcttatcggtcagtttcacctgatttacgtaaaaacccgcttcggcgggtttttgcttttggaggggcagaaagatgaatgactgtccacgacgctatacccaaaagaaa

SEQ ID NO: 264 - DNA, 5122 bp, synthetic construct
  source 1..5122: mol_type = other DNA
aggctaggtggaggctcagtgatgataagtctgcgatggtggatgcatgtgtcatggtcatagctgtttcctgtgtgaaattgttatccgctcagagggcacaatcctattccgcgctatccgacaatctccaagacattaggtggagttcagttcggcgagcggaaatggcttacgaacggggcggagatttcctggaagatgccaggaagatacttaacagggaagtgagagggccgcggcaaagccgtttttccataggctccgcccccctgacaagcatcacgaaatctgacgctcaaatcagtggtggcgaaacccgacaggactataaagataccaggcgtttccccctggcggctccctcgtgcgctctcctgttcctgcctttcggtttaccggtgtcattccgctgttatggccgcgtttgtctcattccacgcctgacactcagttccgggtaggcagttcgctccaagctggactgtatgcacgaaccccccgttcagtccgaccgctgcgccttatccggtaactatcgtcttgagtccaacccggaaagacatgcaaaagcaccactggcagcagccactggtaattgatttagaggagttagtcttgaagtcatgcgccggttaaggctaaactgaaaggacaagttttggtgactgcgctcctccaagccagttacctcggttcaaagagttggtagctcagagaaccttcgaaaaaccgccctgcaaggcggttttttcgttttcagagcaagagattacgcgcagaccaaaacgatctcaagaagatcatcttattaagtctgacgctctattcaacaaagccgccgtccatgggtagggggcttcaaatcgtcctcgtgataccaattcggagcctgcttttttgtacaaacttgttgataatggcaattcaaggatcttcacctagatccttttaaattaaaaatgaagttttaaatcaatctaaagtatatatgagtaaacttggtctgacagttaccaatgcttaatcagtgaggcacctatctcagcgatctgtctatttcgttcatccatagttgcctgactccccgtcgtgtagataactacgatacgggagggcttaccatctggccccagtgctgcaatgataccgcgagagccacgctcaccggctccagatttatcagcaataaaccagccagccggaagggccgagcgcagaagtggtcctgcaactttatccgcctccatccagtctattaattgttgccgggaagctagagtaagtagttcgccagttaatagtttgcgcaacgttgttgccattgctacaggcatcgtggtgtcacgctcgtcgtttggtatggcttcattcagctccggttcccaacgatcaaggcgagttacatgatcccccatgttgtgcaaaaaagcggttagctccttcggtcctccgatcgttgtcagaagtaagttggccgcagtgttatcactcatggttatggcagcactgcataattctcttactgtcatgccatccgtaagatgcttttctgtgactggtgagtactcaaccaagtcattctgagaatagtgtatgcggcgaccgagttgctcttgcccggcgtcaatacgggataataccgcgccacatagcagaactttaaaagtgctcatcattggaaaacgttcttcggggcgaaaactctcaaggatcttaccgctgttgagatccagttcgatgtaacccactcgtgcacccaactgatcttcagcatcttttactttcaccagcgtttctgggtgagcaaaaacaggaaggcaaaatgccgcaaaaaagggaataagggcgacacggaaatgttgaatactcatactcttcctttttcaatattattgaagcatttatcagggttattgtctcatgagcggatacatatttgaatgtatttagaaaaataaacaaataggggttccgcgcacatttccccgaaaagtgccagatacctgaaacaaaacccatcgtacggccaaggaagtctccaataactgtgatccaccacaagcgccagggttttcccagtcacgacgttgtaaaacgacggccagtcatgcataatccgcacgcatctggaataaggaagtgccattccgcctgacctttgcctatgaggaccaaaacgaaaaaacaccctttcgggtgtcttttctggaatttggtaccgagaggctccatgattcagtatgacttgcctttggtcgaaaaaaaaagcccgcactgtcaggtgcgggcttttttctgtgtttccttattaggacccactttcacatttaagttgtttttctaatccgcatatgatcaattcaaggccgaataagaaggctggctctgcaccttggtgatcaaataattcgatagcttgtcgtaataatggcggcatactatcagtagtaggtgtttccctttcttctttagcgacttgatgctcttgatcttccaatacgcaacctaaagtaaaatgccccacagcgctgagtgcatataatgcattctctagtgaaaaaccttgttggcataaaaaggctaattgattttcgagagtttcatactgtttttctgtaggccgtgtacctaaatgtacttttgctccatcgcgatgacttagtaaagcacatctaaaacttttagcgttattacgtaaaaaatcttgccagctttccccttctaaagggcaaaagtgagtatggtgcctatctaacatctcaatggctaaggcgtcgagcaaagcccgcttattttttacatgccaatacaatgtaggctgctctacacctagcttctgggcgagtttacgggttgttaaaccttcgattccgacctcattaagcagctctaatgcgctgttaatcactttacttttatctaatctggacatattcaccaccctgaattgactctcttccgggcgctatcatgccataccgcgaaaggttttgcgccattcgatggcgcgccgccattgcttgtgcaatgtacatcagagattttgagacacaaccaattattgaaggcctccctaacggggggcctttttttgtttctggtcccccgcttaacgatcgttggctgttttcagcaggacgcactgacctccctatcagtgatagagattgacatccctatcagtgatagagatactgagcacagctgtcaccggatgtgctttccggtctgatgagtccgtgaggacgaaacagcctctacaaataattttgtttaaatcacacgggtaaggaggtatttaaatgaaaacactgtcccaagcacagtcgaagacgagtagccagcagttttctttcaccggtaattctagcgctaacgtgattatcggcaaccagaaactaactatcaacgacgtcgcccgcgttgctcggaacgggaccttagtaagcctgactaacaacactgatatacttcaaggcattcaggcgtcctgtgattatatcaataacgcagttgagtctggtgaaccaatttacggtgtgacctcaggcttcggcggtatggcgaacgttgctatcagccgtgaacaggcctccgaactgcaaagtaatgcggtatggtatacgaaaactggtgctgggaacaaactccctttggcggacgtacgtgcagcaatgctgctgcgcgccaactcgcatatgcgtggcgcgtccggtatccgtctggagctgatcaaacgtatggaaatcttcttgaacgctggtgttactccgtacgtttatgaatttggatctatcggcgcttctggagatctggtcccgctgagctacattacgggttccctgattggccttgacccgagcttcaaggtggatttcaacggcaaagaaatggacgccccgaccgcgttacgccagttaaatctgtctcccctgacacttctgcctaaagaatcgattgctatgatgaatgggacctcagtcatgactggcatcgcagctaactgcgtatacgacacccagatcctgactgcgattgcaatgggtgttcacgctctggatatccaggccctgaacggcaccaaccagtctttccacccgtttatccataactctaagccgcacccaggtcagctgtgggcggctgatcagatgatatcattgctggctaactcgcaactggtacgggacgagctggacggcaaacatgattaccgcgaccacgagctgatccaggatcgttatagcctgcgttgccttccgcagtacctgggtccgattgtggacggtatctcacagatagcaaaacaaatcgaaattgaaattaactccgttactgataaccctctgattgacgtcgataaccaggcgtcgtaccacggcggaaatttcctgggtcagtatgttggcatgggtatggaccaccttcgctactatatcggcctgctggcgaaacacctggatgtgcagattgcgctgctagctagtcccgaatttagcaacggactgccgccatctttattgggcaaccgtgaacgtaaggttaacatgggtctgaaaggtttacaaatctgtggcaattccatcatgccgctgctgacgttctacggcaatagcatcgccgaccgctttccgacccatgcagagcaattcaaccagaatatcaactctcagggctacacctccgcaacgctggcgcgacgtagtgttgatatcttccaaaactacgttgcgattgccctgatgtttggcgtccaggctgtagacctgaggacttataaaaagactggccattacgatgcgcgtgcttgcctctctccggctaccgaacgcctgtattccgccgtgcgtcacgtagttggtcagaaacctacttcagatcgcccatacatctggaacgataacgagcagggtctggatgaacacatcgctcgcatctccgctgacattgccgctggcggagtaattgttcaagctgtacaggatatcctgccgtgcctgcactaaccggcttatcggtcagtttcacctgatttacgtaaaaacccgcttcggcgggtttttgcttttggaggggcagaaagatgaatgactgtccacgacgctatacccaaaagaaa

SEQ ID NO: 265 - DNA, 5122 bp, synthetic construct
  source 1..5122: mol_type = other DNA
aggctaggtggaggctcagtgatgataagtctgcgatggtggatgcatgtgtcatggtcatagctgtttcctgtgtgaaattgttatccgctcagagggcacaatcctattccgcgctatccgacaatctccaagacattaggtggagttcagttcggcgagcggaaatggcttacgaacggggcggagatttcctggaagatgccaggaagatacttaacagggaagtgagagggccgcggcaaagccgtttttccataggctccgcccccctgacaagcatcacgaaatctgacgctcaaatcagtggtggcgaaacccgacaggactataaagataccaggcgtttccccctggcggctccctcgtgcgctctcctgttcctgcctttcggtttaccggtgtcattccgctgttatggccgcgtttgtctcattccacgcctgacactcagttccgggtaggcagttcgctccaagctggactgtatgcacgaaccccccgttcagtccgaccgctgcgccttatccggtaactatcgtcttgagtccaacccggaaagacatgcaaaagcaccactggcagcagccactggtaattgatttagaggagttagtcttgaagtcatgcgccggttaaggctaaactgaaaggacaagttttggtgactgcgctcctccaagccagttacctcggttcaaagagttggtagctcagagaaccttcgaaaaaccgccctgcaaggcggttttttcgttttcagagcaagagattacgcgcagaccaaaacgatctcaagaagatcatcttattaagtctgacgctctattcaacaaagccgccgtccatgggtagggggcttcaaatcgtcctcgtgataccaattcggagcctgcttttttgtacaaacttgttgataatggcaattcaaggatcttcacctagatccttttaaattaaaaatgaagttttaaatcaatctaaagtatatatgagtaaacttggtctgacagttaccaatgcttaatcagtgaggcacctatctcagcgatctgtctatttcgttcatccatagttgcctgactccccgtcgtgtagataactacgatacgggagggcttaccatctggccccagtgctgcaatgataccgcgagagccacgctcaccggctccagatttatcagcaataaaccagccagccggaagggccgagcgcagaagtggtcctgcaactttatccgcctccatccagtctattaattgttgccgggaagctagagtaagtagttcgccagttaatagtttgcgcaacgttgttgccattgctacaggcatcgtggtgtcacgctcgtcgtttggtatggcttcattcagctccggttcccaacgatcaaggcgagttacatgatcccccatgttgtgcaaaaaagcggttagctccttcggtcctccgatcgttgtcagaagtaagttggccgcagtgttatcactcatggttatggcagcactgcataattctcttactgtcatgccatccgtaagatgcttttctgtgactggtgagtactcaaccaagtcattctgagaatagtgtatgcggcgaccgagttgctcttgcccggcgtcaatacgggataataccgcgccacatagcagaactttaaaagtgctcatcattggaaaacgttcttcggggcgaaaactctcaaggatcttaccgctgttgagatccagttcgatgtaacccactcgtgcacccaactgatcttcagcatcttttactttcaccagcgtttctgggtgagcaaaaacaggaaggcaaaatgccgcaaaaaagggaataagggcgacacggaaatgttgaatactcatactcttcctttttcaatattattgaagcatttatcagggttattgtctcatgagcggatacatatttgaatgtatttagaaaaataaacaaataggggttccgcgcacatttccccgaaaagtgccagatacctgaaacaaaacccatcgtacggccaaggaagtctccaataactgtgatccaccacaagcgccagggttttcccagtcacgacgttgtaaaacgacggccagtcatgcataatccgcacgcatctggaataaggaagtgccattccgcctgacctttgcctatgaggaccaaaacgaaaaaacaccctttcgggtgtcttttctggaatttggtaccgagaggctccatgattcagtatgacttgcctttggtcgaaaaaaaaagcccgcactgtcaggtgcgggcttttttctgtgtttccttattaggacccactttcacatttaagttgtttttctaatccgcatatgatcaattcaaggccgaataagaaggctggctctgcaccttggtgatcaaataattcgatagcttgtcgtaataatggcggcatactatcagtagtaggtgtttccctttcttctttagcgacttgatgctcttgatcttccaatacgcaacctaaagtaaaatgccccacagcgctgagtgcatataatgcattctctagtgaaaaaccttgttggcataaaaaggctaattgattttcgagagtttcatactgtttttctgtaggccgtgtacctaaatgtacttttgctccatcgcgatgacttagtaaagcacatctaaaacttttagcgttattacgtaaaaaatcttgccagctttccccttctaaagggcaaaagtgagtatggtgcctatctaacatctcaatggctaaggcgtcgagcaaagcccgcttattttttacatgccaatacaatgtaggctgctctacacctagcttctgggcgagtttacgggttgttaaaccttcgattccgacctcattaagcagctctaatgcgctgttaatcactttacttttatctaatctggacatattcaccaccctgaattgactctcttccgggcgctatcatgccataccgcgaaaggttttgcgccattcgatggcgcgccgccattgcttgtgcaatgtacatcagagattttgagacacaaccaattattgaaggcctccctaacggggggcctttttttgtttctggtcccccgcttaacgatcgttggctgttttcagcaggacgcactgacctccctatcagtgatagagattgacatccctatcagtgatagagatactgagcacagctgtcaccggatgtgctttccggtctgatgagtccgtgaggacgaaacagcctctacaaataattttgtttaaatcacacgggtaaggaggtatttaaatgaaaacactgtcccaagcacagtcgaagacgagtagccagcagttttctttcaccggtaattctagcgctaacgtgattatcggcaaccagaaactaactatcaacgacgtcgcccgcgttgctcggaacgggaccttagtaagcctgactaacaacactgatatacttcaaggcattcaggcgtcctgtgattatatcaataacgcagttgagtctggtgaaccaatttacggtgtgacctcaggcttcggcggtatggcgaacgttgctatcagccgtgaacaggcctccgaactgcaaaagaatattgtatggcacctgaaaactggtgctgggaacaaactccctttggcggacgtacgtgcagcaatgctgctgcgcgccaactcgcatatgcgtggcgcgtccggtatccgtctggagctgatcaaacgtatggaaatcttcttgaacgctggtgttactccgtacgtttatgaatttggatctatcggcgcttctggagatctggtcccgctgagctacattacgggttccctgattggccttgacccgagcttcaaggtggatttcaacggcaaagaaatggacgccccgaccgcgttacgccagttaaatctgtctcccctgacacttctgcctaaagaaggtattgctatgattaatgggacctcagtcatgactggcatcgcagctaactgcgtatacgacacccagatcctgactgcgattgcaatgggtgttcacgctctggatatccaggccctgaacggcaccaaccagtctttccacccgtttatccataactctaagccgcacccaggtcagctgtgggcggctgatcagatgatatcattgctggctaactcgcaactggtacgggacgagctggacggcaaacatgattaccgcgaccacgagctgatccaggatcgttatagcctgcgttgccttccgcagtacctgggtccgattgtggacggtatctcacagatagcaaaacaaatcgaaattgaaattaactccgttactgataaccctctgattgacgtcgataaccaggcgtcgtaccacggcggaaatttcctgggtcagtatgttggcatgggtatggaccaccttcgctactatatcggcctgctggcgaaacacctggatgtgcagattgcgctgctagctagtcccgaatttagcaacggactgccgccatctttattgggcaaccgtgaacgtaaggttaacatgggtctgaaaggtttacaaatctgtggcaattccatcatgccgctgctgacgttctacggcaatagcatcgccgaccgctttccgacccatgcagagcaattcaaccagaatatcaactctcagggctacacctccgcaacgctggcgcgacgtagtgttgatatcttccaaaactacgttgcgattgccctgatgtttggcgtccaggctgtagacctgaggacttataaaaagactggccattacgatgcgcgtgcttgcctctctccggctaccgaacgcctgtattccgccgtgcgtcacgtagttggtcagaaacctacttcagatcgcccatacatctggaacgataacgagcagggtctggatgaacacatcgctcgcatctccgctgacattgccgctggcggagtaattgttcaagctgtacaggatatcctgccgtgcctgcactaaccggcttatcggtcagtttcacctgatttacgtaaaaacccgcttcggcgggtttttgcttttggaggggcagaaagatgaatgactgtccacgacgctatacccaaaagaaa

SEQ ID NO: 266 - DNA, 5122 bp, synthetic construct
  source 1..5122: mol_type = other DNA
aggctaggtggaggctcagtgatgataagtctgcgatggtggatgcatgtgtcatggtcatagctgtttcctgtgtgaaattgttatccgctcagagggcacaatcctattccgcgctatccgacaatctccaagacattaggtggagttcagttcggcgagcggaaatggcttacgaacggggcggagatttcctggaagatgccaggaagatacttaacagggaagtgagagggccgcggcaaagccgtttttccataggctccgcccccctgacaagcatcacgaaatctgacgctcaaatcagtggtggcgaaacccgacaggactataaagataccaggcgtttccccctggcggctccctcgtgcgctctcctgttcctgcctttcggtttaccggtgtcattccgctgttatggccgcgtttgtctcattccacgcctgacactcagttccgggtaggcagttcgctccaagctggactgtatgcacgaaccccccgttcagtccgaccgctgcgccttatccggtaactatcgtcttgagtccaacccggaaagacatgcaaaagcaccactggcagcagccactggtaattgatttagaggagttagtcttgaagtcatgcgccggttaaggctaaactgaaaggacaagttttggtgactgcgctcctccaagccagttacctcggttcaaagagttggtagctcagagaaccttcgaaaaaccgccctgcaaggcggttttttcgttttcagagcaagagattacgcgcagaccaaaacgatctcaagaagatcatcttattaagtctgacgctctattcaacaaagccgccgtccatgggtagggggcttcaaatcgtcctcgtgataccaattcggagcctgcttttttgtacaaacttgttgataatggcaattcaaggatcttcacctagatccttttaaattaaaaatgaagttttaaatcaatctaaagtatatatgagtaaacttggtctgacagttaccaatgcttaatcagtgaggcacctatctcagcgatctgtctatttcgttcatccatagttgcctgactccccgtcgtgtagataactacgatacgggagggcttaccatctggccccagtgctgcaatgataccgcgagagccacgctcaccggctccagatttatcagcaataaaccagccagccggaagggccgagcgcagaagtggtcctgcaactttatccgcctccatccagtctattaattgttgccgggaagctagagtaagtagttcgccagttaatagtttgcgcaacgttgttgccattgctacaggcatcgtggtgtcacgctcgtcgtttggtatggcttcattcagctccggttcccaacgatcaaggcgagttacatgatcccccatgttgtgcaaaaaagcggttagctccttcggtcctccgatcgttgtcagaagtaagttggccgcagtgttatcactcatggttatggcagcactgcataattctcttactgtcatgccatccgtaagatgcttttctgtgactggtgagtactcaaccaagtcattctgagaatagtgtatgcggcgaccgagttgctcttgcccggcgtcaatacgggataataccgcgccacatagcagaactttaaaagtgctcatcattggaaaacgttcttcggggcgaaaactctcaaggatcttaccgctgttgagatccagttcgatgtaacccactcgtgcacccaactgatcttcagcatcttttactttcaccagcgtttctgggtgagcaaaaacaggaaggcaaaatgccgcaaaaaagggaataagggcgacacggaaatgttgaatactcatactcttcctttttcaatattattgaagcatttatcagggttattgtctcatgagcggatacatatttgaatgtatttagaaaaataaacaaataggggttccgcgcacatttccccgaaaagtgccagatacctgaaacaaaacccatcgtacggccaaggaagtctccaataactgtgatccaccacaagcgccagggttttcccagtcacgacgttgtaaaacgacggccagtcatgcataatccgcacgcatctggaataaggaagtgccattccgcctgacctttgcctatgaggaccaaaacgaaaaaacaccctttcgggtgtcttttctggaatttggtaccgagaggctccatgattcagtatgacttgcctttggtcgaaaaaaaaagcccgcactgtcaggtgcgggcttttttctgtgtttccttattaggacccactttcacatttaagttgtttttctaatccgcatatgatcaattcaaggccgaataagaaggctggctctgcaccttggtgatcaaataattcgatagcttgtcgtaataatggcggcatactatcagtagtaggtgtttccctttcttctttagcgacttgatgctcttgatcttccaatacgcaacctaaagtaaaatgccccacagcgctgagtgcatataatgcattctctagtgaaaaaccttgttggcataaaaaggctaattgattttcgagagtttcatactgtttttctgtaggccgtgtacctaaatgtacttttgctccatcgcgatgacttagtaaagcacatctaaaacttttagcgttattacgtaaaaaatcttgccagctttccccttctaaagggcaaaagtgagtatggtgcctatctaacatctcaatggctaaggcgtcgagcaaagcccgcttattttttacatgccaatacaatgtaggctgctctacacctagcttctgggcgagtttacgggttgttaaaccttcgattccgacctcattaagcagctctaatgcgctgttaatcactttacttttatctaatctggacatattcaccaccctgaattgactctcttccgggcgctatcatgccataccgcgaaaggttttgcgccattcgatggcgcgccgccattgcttgtgcaatgtacatcagagattttgagacacaaccaattattgaaggcctccctaacggggggcctttttttgtttctggtcccccgcttaacgatcgttggctgttttcagcaggacgcactgacctccctatcagtgatagagattgacatccctatcagtgatagagatactgagcacagctgtcaccggatgtgctttccggtctgatgagtccgtgaggacgaaacagcctctacaaataattttgtttaaatcacacgggtaaggaggtatttaaatgaaaacactgtcccaagcacagtcgaagacgagtagccagcagttttctttcaccggtaattctagcgctaacgtgattatcggcaaccagaaactaactatcaacgacgtcgcccgcgttgctcggaacgggaccttagtaagcctgactaacaacactgatatacttcaaggcattcaggcgtcctgtgattatatcaataacgcagttgagtctggtgaaccaatttacggtgtgacctcaggcttcggcggtatggcgaacgttgctatcagccgtgaacaggcctccgaactgcaaaagaatattgtatggcatcacaaaactggtgctgggaacaaactccctttggcggacgtacgtgcagcaatgctgctgcgcgccaactcgcatatgcgtggcgcgtccggtatccgtctggagctgatcaaacgtatggaaatcttcttgaacgctggtgttactccgtacgtttatgaatttggatctatcggcgcttctggagatctggtcccgctgagctacattacgggttccctgattggccttgacccgagcttcaaggtggatttcaacggcaaagaaatggacgccccgaccgcgttacgccagttaaatctgtctcccctgacacttctgcctaaagaaggtctagctatgaccaatgggacctcagtcatgactggcatcgcagctaactgcgtatacgacacccagatcctgactgcgattgcaatgggtgttcacgctctggatatccaggccctgaacggcaccaaccagtctttccacccgtttatccataactctaagccgcacccaggtcagctgtgggcggctgatcagatgatatcattgctggctaactcgcaactggtacgggacgagctggacggcaaacatgattaccgcgaccacgagctgatccaggatcgttatagcctgcgttgccttccgcagtacctgggtccgattgtggacggtatctcacagatagcaaaacaaatcgaaattgaaattaactccgttactgataaccctctgattgacgtcgataaccaggcgtcgtaccacggcggaaatttcctgggtcagtatgttggcatgggtatggaccaccttcgctactatatcggcctgctggcgaaacacctggatgtgcagattgcgctgctagctagtcccgaatttagcaacggactgccgccatctttattgggcaaccgtgaacgtaaggttaacatgggtctgaaaggtttacaaatctgtggcaattccatcatgccgctgctgacgttctacggcaatagcatcgccgaccgctttccgacccatgcagagcaattcaaccagaatatcaactctcagggctacacctccgcaacgctggcgcgacgtagtgttgatatcttccaaaactacgttgcgattgccctgatgtttggcgtccaggctgtagacctgaggacttataaaaagactggccattacgatgcgcgtgcttgcctctctccggctaccgaacgcctgtattccgccgtgcgtcacgtagttggtcagaaacctacttcagatcgcccatacatctggaacgataacgagcagggtctggatgaacacatcgctcgcatctccgctgacattgccgctggcggagtaattgttcaagctgtacaggatatcctgccgtgcctgcactaaccggcttatcggtcagtttcacctgatttacgtaaaaacccgcttcggcgggtttttgcttttggaggggcagaaagatgaatgactgtccacgacgctatacccaaaagaaa

SEQ ID NO: 267 - DNA, 5122 bp, synthetic construct
  source 1..5122: mol_type = other DNA
aggctaggtggaggctcagtgatgataagtctgcgatggtggatgcatgtgtcatggtcatagctgtttcctgtgtgaaattgttatccgctcagagggcacaatcctattccgcgctatccgacaatctccaagacattaggtggagttcagttcggcgagcggaaatggcttacgaacggggcggagatttcctggaagatgccaggaagatacttaacagggaagtgagagggccgcggcaaagccgtttttccataggctccgcccccctgacaagcatcacgaaatctgacgctcaaatcagtggtggcgaaacccgacaggactataaagataccaggcgtttccccctggcggctccctcgtgcgctctcctgttcctgcctttcggtttaccggtgtcattccgctgttatggccgcgtttgtctcattccacgcctgacactcagttccgggtaggcagttcgctccaagctggactgtatgcacgaaccccccgttcagtccgaccgctgcgccttatccggtaactatcgtcttgagtccaacccggaaagacatgcaaaagcaccactggcagcagccactggtaattgatttagaggagttagtcttgaagtcatgcgccggttaaggctaaactgaaaggacaagttttggtgactgcgctcctccaagccagttacctcggttcaaagagttggtagctcagagaaccttcgaaaaaccgccctgcaaggcggttttttcgttttcagagcaagagattacgcgcagaccaaaacgatctcaagaagatcatcttattaagtctgacgctctattcaacaaagccgccgtccatgggtagggggcttcaaatcgtcctcgtgataccaattcggagcctgcttttttgtacaaacttgttgataatggcaattcaaggatcttcacctagatccttttaaattaaaaatgaagttttaaatcaatctaaagtatatatgagtaaacttggtctgacagttaccaatgcttaatcagtgaggcacctatctcagcgatctgtctatttcgttcatccatagttgcctgactccccgtcgtgtagataactacgatacgggagggcttaccatctggccccagtgctgcaatgataccgcgagagccacgctcaccggctccagatttatcagcaataaaccagccagccggaagggccgagcgcagaagtggtcctgcaactttatccgcctccatccagtctattaattgttgccgggaagctagagtaagtagttcgccagttaatagtttgcgcaacgttgttgccattgctacaggcatcgtggtgtcacgctcgtcgtttggtatggcttcattcagctccggttcccaacgatcaaggcgagttacatgatcccccatgttgtgcaaaaaagcggttagctccttcggtcctccgatcgttgtcagaagtaagttggccgcagtgttatcactcatggttatggcagcactgcataattctcttactgtcatgccatccgtaagatgcttttctgtgactggtgagtactcaaccaagtcattctgagaatagtgtatgcggcgaccgagttgctcttgcccggcgtcaatacgggataataccgcgccacatagcagaactttaaaagtgctcatcattggaaaacgttcttcggggcgaaaactctcaaggatcttaccgctgttgagatccagttcgatgtaacccactcgtgcacccaactgatcttcagcatcttttactttcaccagcgtttctgggtgagcaaaaacaggaaggcaaaatgccgcaaaaaagggaataagggcgacacggaaatgttgaatactcatactcttcctttttcaatattattgaagcatttatcagggttattgtctcatgagcggatacatatttgaatgtatttagaaaaataaacaaataggggttccgcgcacatttccccgaaaagtgccagatacctgaaacaaaacccatcgtacggccaaggaagtctccaataactgtgatccaccacaagcgccagggttttcccagtcacgacgttgtaaaacgacggccagtcatgcataatccgcacgcatctggaataaggaagtgccattccgcctgacctttgcctatgaggaccaaaacgaaaaaacaccctttcgggtgtcttttctggaatttggtaccgagaggctccatgattcagtatgacttgcctttggtcgaaaaaaaaagcccgcactgtcaggtgcgggcttttttctgtgtttccttattaggacccactttcacatttaagttgtttttctaatccgcatatgatcaattcaaggccgaataagaaggctggctctgcaccttggtgatcaaataattcgatagcttgtcgtaataatggcggcatactatcagtagtaggtgtttccctttcttctttagcgacttgatgctcttgatcttccaatacgcaacctaaagtaaaatgccccacagcgctgagtgcatataatgcattctctagtgaaaaaccttgttggcataaaaaggctaattgattttcgagagtttcatactgtttttctgtaggccgtgtacctaaatgtacttttgctccatcgcgatgacttagtaaagcacatctaaaacttttagcgttattacgtaaaaaatcttgccagctttccccttctaaagggcaaaagtgagtatggtgcctatctaacatctcaatggctaaggcgtcgagcaaagcccgcttattttttacatgccaatacaatgtaggctgctctacacctagcttctgggcgagtttacgggttgttaaaccttcgattccgacctcattaagcagctctaatgcgctgttaatcactttacttttatctaatctggacatattcaccaccctgaattgactctcttccgggcgctatcatgccataccgcgaaaggttttgcgccattcgatggcgcgccgccattgcttgtgcaatgtacatcagagattttgagacacaaccaattattgaaggcctccctaacggggggcctttttttgtttctggtcccccgcttaacgatcgttggctgttttcagcaggacgcactgacctccctatcagtgatagagattgacatccctatcagtgatagagatactgagcacagctgtcaccggatgtgctttccggtctgatgagtccgtgaggacgaaacagcctctacaaataattttgtttaaatcacacgggtaaggaggtatttaaatgaaaacactgtcccaagcacagtcgaagacgagtagccagcagttttctttcaccggtaattctagcgctaacgtgattatcggcaaccagaaactaactatcaacgacgtcgcccgcgttgctcggaacgggaccttagtaagcctgactaacaacactgatatacttcaaggcattcaggcgtcctgtgattatatcaataacgcagttgagtctggtgaaccaatttacggtgtgacctcaggcttcggcggtatggcgaacgttgctatcagccgtgaacaggcctccgaactgcaaaagaatattgtatggcacctgaaaactggtgctgggaacaaactccctttggcggacgtacgtgcagcaatgctgctgcgcgccaactcgcatatgcgtggcgcgtccggtatccgtctggagctgatcaaacgtatggaaatcttcttgaacgctggtgttactccgtacgtttatgaatttggatctatcggcgcttctggagatctggtcccgctgagctacattacgggttccctgattggccttgacccgagcttcaaggtggatttcaacggcaaagaaatggacgccccgaccgcgttacgccagttaaatctgtctcccctgacacttctgcctaaagaaggtattgctatgctaaatgggacctcagtcatgactggcatcgcagctaactgcgtatacgacacccagatcctgactgcgattgcaatgggtgttcacgctctggatatccaggccctgaacggcaccaaccagtctttccacccgtttatccataactctaagccgcacccaggtcagctgtgggcggctgatcagatgatatcattgctggctaactcgcaactggtacgggacgagctggacggcaaacatgattaccgcgaccacgagctgatccaggatcgttatagcctgcgttgccttccgcagtacctgggtccgattgtggacggtatctcacagatagcaaaacaaatcgaaattgaaattaactccgttactgataaccctctgattgacgtcgataaccaggcgtcgtaccacggcggaaatttcctgggtcagtatgttggcatgggtatggaccaccttcgctactatatcggcctgctggcgaaacacctggatgtgcagattgcgctgctagctagtcccgaatttagcaacggactgccgccatctttattgggcaaccgtgaacgtaaggttaacatgggtctgaaaggtttacaaatctgtggcaattccatcatgccgctgctgacgttctacggcaatagcatcgccgaccgctttccgacccatgcagagcaattcaaccagaatatcaactctcagggctacacctccgcaacgctggcgcgacgtagtgttgatatcttccaaaactacgttgcgattgccctgatgtttggcgtccaggctgtagacctgaggacttataaaaagactggccattacgatgcgcgtgcttgcctctctccggctaccgaacgcctgtattccgccgtgcgtcacgtagttggtcagaaacctacttcagatcgcccatacatctggaacgataacgagcagggtctggatgaacacatcgctcgcatctccgctgacattgccgctggcggagtaattgttcaagctgtacaggatatcctgccgtgcctgcactaaccggcttatcggtcagtttcacctgatttacgtaaaaacccgcttcggcgggtttttgcttttggaggggcagaaagatgaatgactgtccacgacgctatacccaaaagaaa

SEQ ID NO: 268 - DNA, 5122 bp, synthetic construct
  source 1..5122: mol_type = other DNA
aggctaggtggaggctcagtgatgataagtctgcgatggtggatgcatgtgtcatggtcatagctgtttcctgtgtgaaattgttatccgctcagagggcacaatcctattccgcgctatccgacaatctccaagacattaggtggagttcagttcggcgagcggaaatggcttacgaacggggcggagatttcctggaagatgccaggaagatacttaacagggaagtgagagggccgcggcaaagccgtttttccataggctccgcccccctgacaagcatcacgaaatctgacgctcaaatcagtggtggcgaaacccgacaggactataaagataccaggcgtttccccctggcggctccctcgtgcgctctcctgttcctgcctttcggtttaccggtgtcattccgctgttatggccgcgtttgtctcattccacgcctgacactcagttccgggtaggcagttcgctccaagctggactgtatgcacgaaccccccgttcagtccgaccgctgcgccttatccggtaactatcgtcttgagtccaacccggaaagacatgcaaaagcaccactggcagcagccactggtaattgatttagaggagttagtcttgaagtcatgcgccggttaaggctaaactgaaaggacaagttttggtgactgcgctcctccaagccagttacctcggttcaaagagttggtagctcagagaaccttcgaaaaaccgccctgcaaggcggttttttcgttttcagagcaagagattacgcgcagaccaaaacgatctcaagaagatcatcttattaagtctgacgctctattcaacaaagccgccgtccatgggtagggggcttcaaatcgtcctcgtgataccaattcggagcctgcttttttgtacaaacttgttgataatggcaattcaaggatcttcacctagatccttttaaattaaaaatgaagttttaaatcaatctaaagtatatatgagtaaacttggtctgacagttaccaatgcttaatcagtgaggcacctatctcagcgatctgtctatttcgttcatccatagttgcctgactccccgtcgtgtagataactacgatacgggagggcttaccatctggccccagtgctgcaatgataccgcgagagccacgctcaccggctccagatttatcagcaataaaccagccagccggaagggccgagcgcagaagtggtcctgcaactttatccgcctccatccagtctattaattgttgccgggaagctagagtaagtagttcgccagttaatagtttgcgcaacgttgttgccattgctacaggcatcgtggtgtcacgctcgtcgtttggtatggcttcattcagctccggttcccaacgatcaaggcgagttacatgatcccccatgttgtgcaaaaaagcggttagctccttcggtcctccgatcgttgtcagaagtaagttggccgcagtgttatcactcatggttatggcagcactgcataattctcttactgtcatgccatccgtaagatgcttttctgtgactggtgagtactcaaccaagtcattctgagaatagtgtatgcggcgaccgagttgctcttgcccggcgtcaatacgggataataccgcgccacatagcagaactttaaaagtgctcatcattggaaaacgttcttcggggcgaaaactctcaaggatcttaccgctgttgagatccagttcgatgtaacccactcgtgcacccaactgatcttcagcatcttttactttcaccagcgtttctgggtgagcaaaaacaggaaggcaaaatgccgcaaaaaagggaataagggcgacacggaaatgttgaatactcatactcttcctttttcaatattattgaagcatttatcagggttattgtctcatgagcggatacatatttgaatgtatttagaaaaataaacaaataggggttccgcgcacatttccccgaaaagtgccagatacctgaaacaaaacccatcgtacggccaaggaagtctccaataactgtgatccaccacaagcgccagggttttcccagtcacgacgttgtaaaacgacggccagtcatgcataatccgcacgcatctggaataaggaagtgccattccgcctgacctttgcctatgaggaccaaaacgaaaaaacaccctttcgggtgtcttttctggaatttggtaccgagaggctccatgattcagtatgacttgcctttggtcgaaaaaaaaagcccgcactgtcaggtgcgggcttttttctgtgtttccttattaggacccactttcacatttaagttgtttttctaatccgcatatgatcaattcaaggccgaataagaaggctggctctgcaccttggtgatcaaataattcgatagcttgtcgtaataatggcggcatactatcagtagtaggtgtttccctttcttctttagcgacttgatgctcttgatcttccaatacgcaacctaaagtaaaatgccccacagcgctgagtgcatataatgcattctctagtgaaaaaccttgttggcataaaaaggctaattgattttcgagagtttcatactgtttttctgtaggccgtgtacctaaatgtacttttgctccatcgcgatgacttagtaaagcacatctaaaacttttagcgttattacgtaaaaaatcttgccagctttccccttctaaagggcaaaagtgagtatggtgcctatctaacatctcaatggctaaggcgtcgagcaaagcccgcttattttttacatgccaatacaatgtaggctgctctacacctagcttctgggcgagtttacgggttgttaaaccttcgattccgacctcattaagcagctctaatgcgctgttaatcactttacttttatctaatctggacatattcaccaccctgaattgactctcttccgggcgctatcatgccataccgcgaaaggttttgcgccattcgatggcgcgccgccattgcttgtgcaatgtacatcagagattttgagacacaaccaattattgaaggcctccctaacggggggcctttttttgtttctggtcccccgcttaacgatcgttggctgttttcagcaggacgcactgacctccctatcagtgatagagattgacatccctatcagtgatagagatactgagcacagctgtcaccggatgtgctttccggtctgatgagtccgtgaggacgaaacagcctctacaaataattttgtttaaatcacacgggtaaggaggtatttaaatgaaaacactgtcccaagcacagtcgaagacgagtagccagcagttttctttcaccggtaattctagcgctaacgtgattatcggcaaccagaaactaactatcaacgacgtcgcccgcgttgctcggaacgggaccttagtaagcctgactaacaacactgatatacttcaaggcattcaggcgtcctgtgattatatcaataacgcagttgagtctggtgaaccaatttacggtgtgacctcaggcttcggcggtatggcgaacgttgctatcagccgtgaacaggcctccgaactgcaacataatgcggtatggtatacgaaaactggtgctgggaacaaactccctttggcggacgtacgtgcagcaatgctgctgcgcgccaactcgcatatgcgtggcgcgtccggtatccgtctggagctgatcaaacgtatggaaatcttcttgaacgctggtgttactccgtacgtttatgaatttggatctatcggcgcttctggagatctggtcccgctgagctacattacgggttccctgattggccttgacccgagcttcaaggtggatttcaacggcaaagaaatggacgccccgaccgcgttacgccagttaaatctgtctcccctgacacttctgcctaaagaaggtctagctatgaccaatgggacctcagtcatgactggcatcgcagctaactgcgtatacgacacccagatcctgactgcgattgcaatgggtgttcacgctctggatatccaggccctgaacggcaccaaccagtctttccacccgtttatccataactctaagccgcacccaggtcagctgtgggcggctgatcagatgatatcattgctggctaactcgcaactggtacgggacgagctggacggcaaacatgattaccgcgaccacgagctgatccaggatcgttatagcctgcgttgccttccgcagtacctgggtccgattgtggacggtatctcacagatagcaaaacaaatcgaaattgaaattaactccgttactgataaccctctgattgacgtcgataaccaggcgtcgtaccacggcggaaatttcctgggtcagtatgttggcatgggtatggaccaccttcgctactatatcggcctgctggcgaaacacctggatgtgcagattgcgctgctagctagtcccgaatttagcaacggactgccgccatctttattgggcaaccgtgaacgtaaggttaacatgggtctgaaaggtttacaaatctgtggcaattccatcatgccgctgctgacgttctacggcaatagcatcgccgaccgctttccgacccatgcagagcaattcaaccagaatatcaactctcagggctacacctccgcaacgctggcgcgacgtagtgttgatatcttccaaaactacgttgcgattgccctgatgtttggcgtccaggctgtagacctgaggacttataaaaagactggccattacgatgcgcgtgcttgcctctctccggctaccgaacgcctgtattccgccgtgcgtcacgtagttggtcagaaacctacttcagatcgcccatacatctggaacgataacgagcagggtctggatgaacacatcgctcgcatctccgctgacattgccgctggcggagtaattgttcaagctgtacaggatatcctgccgtgcctgcactaaccggcttatcggtcagtttcacctgatttacgtaaaaacccgcttcggcgggtttttgcttttggaggggcagaaagatgaatgactgtccacgacgctatacccaaaagaaa

SEQ ID NO: 269 - DNA, 5122 bp, synthetic construct
  source 1..5122: mol_type = other DNA
aggctaggtggaggctcagtgatgataagtctgcgatggtggatgcatgtgtcatggtcatagctgtttcctgtgtgaaattgttatccgctcagagggcacaatcctattccgcgctatccgacaatctccaagacattaggtggagttcagttcggcgagcggaaatggcttacgaacggggcggagatttcctggaagatgccaggaagatacttaacagggaagtgagagggccgcggcaaagccgtttttccataggctccgcccccctgacaagcatcacgaaatctgacgctcaaatcagtggtggcgaaacccgacaggactataaagataccaggcgtttccccctggcggctccctcgtgcgctctcctgttcctgcctttcggtttaccggtgtcattccgctgttatggccgcgtttgtctcattccacgcctgacactcagttccgggtaggcagttcgctccaagctggactgtatgcacgaaccccccgttcagtccgaccgctgcgccttatccggtaactatcgtcttgagtccaacccggaaagacatgcaaaagcaccactggcagcagccactggtaattgatttagaggagttagtcttgaagtcatgcgccggttaaggctaaactgaaaggacaagttttggtgactgcgctcctccaagccagttacctcggttcaaagagttggtagctcagagaaccttcgaaaaaccgccctgcaaggcggttttttcgttttcagagcaagagattacgcgcagaccaaaacgatctcaagaagatcatcttattaagtctgacgctctattcaacaaagccgccgtccatgggtagggggcttcaaatcgtcctcgtgataccaattcggagcctgcttttttgtacaaacttgttgataatggcaattcaaggatcttcacctagatccttttaaattaaaaatgaagttttaaatcaatctaaagtatatatgagtaaacttggtctgacagttaccaatgcttaatcagtgaggcacctatctcagcgatctgtctatttcgttcatccatagttgcctgactccccgtcgtgtagataactacgatacgggagggcttaccatctggccccagtgctgcaatgataccgcgagagccacgctcaccggctccagatttatcagcaataaaccagccagccggaagggccgagcgcagaagtggtcctgcaactttatccgcctccatccagtctattaattgttgccgggaagctagagtaagtagttcgccagttaatagtttgcgcaacgttgttgccattgctacaggcatcgtggtgtcacgctcgtcgtttggtatggcttcattcagctccggttcccaacgatcaaggcgagttacatgatcccccatgttgtgcaaaaaagcggttagctccttcggtcctccgatcgttgtcagaagtaagttggccgcagtgttatcactcatggttatggcagcactgcataattctcttactgtcatgccatccgtaagatgcttttctgtgactggtgagtactcaaccaagtcattctgagaatagtgtatgcggcgaccgagttgctcttgcccggcgtcaatacgggataataccgcgccacatagcagaactttaaaagtgctcatcattggaaaacgttcttcggggcgaaaactctcaaggatcttaccgctgttgagatccagttcgatgtaacccactcgtgcacccaactgatcttcagcatcttttactttcaccagcgtttctgggtgagcaaaaacaggaaggcaaaatgccgcaaaaaagggaataagggcgacacggaaatgttgaatactcatactcttcctttttcaatattattgaagcatttatcagggttattgtctcatgagcggatacatatttgaatgtatttagaaaaataaacaaataggggttccgcgcacatttccccgaaaagtgccagatacctgaaacaaaacccatcgtacggccaaggaagtctccaataactgtgatccaccacaagcgccagggttttcccagtcacgacgttgtaaaacgacggccagtcatgcataatccgcacgcatctggaataaggaagtgccattccgcctgacctttgcctatgaggaccaaaacgaaaaaacaccctttcgggtgtcttttctggaatttggtaccgagaggctccatgattcagtatgacttgcctttggtcgaaaaaaaaagcccgcactgtcaggtgcgggcttttttctgtgtttccttattaggacccactttcacatttaagttgtttttctaatccgcatatgatcaattcaaggccgaataagaaggctggctctgcaccttggtgatcaaataattcgatagcttgtcgtaataatggcggcatactatcagtagtaggtgtttccctttcttctttagcgacttgatgctcttgatcttccaatacgcaacctaaagtaaaatgccccacagcgctgagtgcatataatgcattctctagtgaaaaaccttgttggcataaaaaggctaattgattttcgagagtttcatactgtttttctgtaggccgtgtacctaaatgtacttttgctccatcgcgatgacttagtaaagcacatctaaaacttttagcgttattacgtaaaaaatcttgccagctttccccttctaaagggcaaaagtgagtatggtgcctatctaacatctcaatggctaaggcgtcgagcaaagcccgcttattttttacatgccaatacaatgtaggctgctctacacctagcttctgggcgagtttacgggttgttaaaccttcgattccgacctcattaagcagctctaatgcgctgttaatcactttacttttatctaatctggacatattcaccaccctgaattgactctcttccgggcgctatcatgccataccgcgaaaggttttgcgccattcgatggcgcgccgccattgcttgtgcaatgtacatcagagattttgagacacaaccaattattgaaggcctccctaacggggggcctttttttgtttctggtcccccgcttaacgatcgttggctgttttcagcaggacgcactgacctccctatcagtgatagagattgacatccctatcagtgatagagatactgagcacagctgtcaccggatgtgctttccggtctgatgagtccgtgaggacgaaacagcctctacaaataattttgtttaaatcacacgggtaaggaggtatttaaatgaaaacactgtcccaagcacagtcgaagacgagtagccagcagttttctttcaccggtaattctagcgctaacgtgattatcggcaaccagaaactaactatcaacgacgtcgcccgcgttgctcggaacgggaccttagtaagcctgactaacaacactgatatacttcaaggcattcaggcgtcctgtgattatatcaataacgcagttgagtctggtgaaccaatttacggtgtgacctcaggcttcggcggtatggcgaacgttgctatcagccgtgaacaggcctccgaactgcaaaagaatttggtatggcacatgaaaactggtgctgggaacaaactccctttggcggacgtacgtgcagcaatgctgctgcgcgccaactcgcatatgcgtggcgcgtccggtatccgtctggagctgatcaaacgtatggaaatcttcttgaacgctggtgttactccgtacgtttatgaatttggatctatcggcgcttctggagatctggtcccgctgagctacattacgggttccctgattggccttgacccgagcttcaaggtggatttcaacggcaaagaaatggacgccccgaccgcgttacgccagttaaatctgtctcccctgacacttctgcctaaagaaggtattgctatgattaatgggacctcagtcatgactggcatcgcagctaactgcgtatacgacacccagatcctgactgcgattgcaatgggtgttcacgctctggatatccaggccctgaacggcaccaaccagtctttccacccgtttatccataactctaagccgcacccaggtcagctgtgggcggctgatcagatgatatcattgctggctaactcgcaactggtacgggacgagctggacggcaaacatgattaccgcgaccacgagctgatccaggatcgttatagcctgcgttgccttccgcagtacctgggtccgattgtggacggtatctcacagatagcaaaacaaatcgaaattgaaattaactccgttactgataaccctctgattgacgtcgataaccaggcgtcgtaccacggcggaaatttcctgggtcagtatgttggcatgggtatggaccaccttcgctactatatcggcctgctggcgaaacacctggatgtgcagattgcgctgctagctagtcccgaatttagcaacggactgccgccatctttattgggcaaccgtgaacgtaaggttaacatgggtctgaaaggtttacaaatctgtggcaattccatcatgccgctgctgacgttctacggcaatagcatcgccgaccgctttccgacccatgcagagcaattcaaccagaatatcaactctcagggctacacctccgcaacgctggcgcgacgtagtgttgatatcttccaaaactacgttgcgattgccctgatgtttggcgtccaggctgtagacctgaggacttataaaaagactggccattacgatgcgcgtgcttgcctctctccggctaccgaacgcctgtattccgccgtgcgtcacgtagttggtcagaaacctacttcagatcgcccatacatctggaacgataacgagcagggtctggatgaacacatcgctcgcatctccgctgacattgccgctggcggagtaattgttcaagctgtacaggatatcctgccgtgcctgcactaaccggcttatcggtcagtttcacctgatttacgtaaaaacccgcttcggcgggtttttgcttttggaggggcagaaagatgaatgactgtccacgacgctatacccaaaagaaa

SEQ ID NO: 270 - DNA, 5122 bp, synthetic construct
  source 1..5122: mol_type = other DNA
aggctaggtggaggctcagtgatgataagtctgcgatggtggatgcatgtgtcatggtcatagctgtttcctgtgtgaaattgttatccgctcagagggcacaatcctattccgcgctatccgacaatctccaagacattaggtggagttcagttcggcgagcggaaatggcttacgaacggggcggagatttcctggaagatgccaggaagatacttaacagggaagtgagagggccgcggcaaagccgtttttccataggctccgcccccctgacaagcatcacgaaatctgacgctcaaatcagtggtggcgaaacccgacaggactataaagataccaggcgtttccccctggcggctccctcgtgcgctctcctgttcctgcctttcggtttaccggtgtcattccgctgttatggccgcgtttgtctcattccacgcctgacactcagttccgggtaggcagttcgctccaagctggactgtatgcacgaaccccccgttcagtccgaccgctgcgccttatccggtaactatcgtcttgagtccaacccggaaagacatgcaaaagcaccactggcagcagccactggtaattgatttagaggagttagtcttgaagtcatgcgccggttaaggctaaactgaaaggacaagttttggtgactgcgctcctccaagccagttacctcggttcaaagagttggtagctcagagaaccttcgaaaaaccgccctgcaaggcggttttttcgttttcagagcaagagattacgcgcagaccaaaacgatctcaagaagatcatcttattaagtctgacgctctattcaacaaagccgccgtccatgggtagggggcttcaaatcgtcctcgtgataccaattcggagcctgcttttttgtacaaacttgttgataatggcaattcaaggatcttcacctagatccttttaaattaaaaatgaagttttaaatcaatctaaagtatatatgagtaaacttggtctgacagttaccaatgcttaatcagtgaggcacctatctcagcgatctgtctatttcgttcatccatagttgcctgactccccgtcgtgtagataactacgatacgggagggcttaccatctggccccagtgctgcaatgataccgcgagagccacgctcaccggctccagatttatcagcaataaaccagccagccggaagggccgagcgcagaagtggtcctgcaactttatccgcctccatccagtctattaattgttgccgggaagctagagtaagtagttcgccagttaatagtttgcgcaacgttgttgccattgctacaggcatcgtggtgtcacgctcgtcgtttggtatggcttcattcagctccggttcccaacgatcaaggcgagttacatgatcccccatgttgtgcaaaaaagcggttagctccttcggtcctccgatcgttgtcagaagtaagttggccgcagtgttatcactcatggttatggcagcactgcataattctcttactgtcatgccatccgtaagatgcttttctgtgactggtgagtactcaaccaagtcattctgagaatagtgtatgcggcgaccgagttgctcttgcccggcgtcaatacgggataataccgcgccacatagcagaactttaaaagtgctcatcattggaaaacgttcttcggggcgaaaactctcaaggatcttaccgctgttgagatccagttcgatgtaacccactcgtgcacccaactgatcttcagcatcttttactttcaccagcgtttctgggtgagcaaaaacaggaaggcaaaatgccgcaaaaaagggaataagggcgacacggaaatgttgaatactcatactcttcctttttcaatattattgaagcatttatcagggttattgtctcatgagcggatacatatttgaatgtatttagaaaaataaacaaataggggttccgcgcacatttccccgaaaagtgccagatacctgaaacaaaacccatcgtacggccaaggaagtctccaataactgtgatccaccacaagcgccagggttttcccagtcacgacgttgtaaaacgacggccagtcatgcataatccgcacgcatctggaataaggaagtgccattccgcctgacctttgcctatgaggaccaaaacgaaaaaacaccctttcgggtgtcttttctggaatttggtaccgagaggctccatgattcagtatgacttgcctttggtcgaaaaaaaaagcccgcactgtcaggtgcgggcttttttctgtgtttccttattaggacccactttcacatttaagttgtttttctaatccgcatatgatcaattcaaggccgaataagaaggctggctctgcaccttggtgatcaaataattcgatagcttgtcgtaataatggcggcatactatcagtagtaggtgtttccctttcttctttagcgacttgatgctcttgatcttccaatacgcaacctaaagtaaaatgccccacagcgctgagtgcatataatgcattctctagtgaaaaaccttgttggcataaaaaggctaattgattttcgagagtttcatactgtttttctgtaggccgtgtacctaaatgtacttttgctccatcgcgatgacttagtaaagcacatctaaaacttttagcgttattacgtaaaaaatcttgccagctttccccttctaaagggcaaaagtgagtatggtgcctatctaacatctcaatggctaaggcgtcgagcaaagcccgcttattttttacatgccaatacaatgtaggctgctctacacctagcttctgggcgagtttacgggttgttaaaccttcgattccgacctcattaagcagctctaatgcgctgttaatcactttacttttatctaatctggacatattcaccaccctgaattgactctcttccgggcgctatcatgccataccgcgaaaggttttgcgccattcgatggcgcgccgccattgcttgtgcaatgtacatcagagattttgagacacaaccaattattgaaggcctccctaacggggggcctttttttgtttctggtcccccgcttaacgatcgttggctgttttcagcaggacgcactgacctccctatcagtgatagagattgacatccctatcagtgatagagatactgagcacagctgtcaccggatgtgctttccggtctgatgagtccgtgaggacgaaacagcctctacaaataattttgtttaaatcacacgggtaaggaggtatttaaatgaaaacactgtcccaagcacagtcgaagacgagtagccagcagttttctttcaccggtaattctagcgctaacgtgattatcggcaaccagaaactaactatcaacgacgtcgcccgcgttgctcggaacgggaccttagtaagcctgactaacaacactgatatacttcaaggcattcaggcgtcctgtgattatatcaataacgcagttgagtctggtgaaccaatttacggtgtgacctcaggcttcggcggtatggcgaacgttgctatcagccgtgaacaggcctccgaactgcaacataatatggtatggagtatgaaaactggtgctgggaacaaactccctttggcggacgtacgtgcagcaatgctgctgcgcgccaactcgcatatgcgtggcgcgtccggtatccgtctggagctgatcaaacgtatggaaatcttcttgaacgctggtgttactccgtacgtttatgaatttggatctatcggcgcttctggagatctggtcccgctgagctacattacgggttccctgattggccttgacccgagcttcaaggtggatttcaacggcaaagaaatggacgccccgaccgcgttacgccagttaaatctgtctcccctgacacttctgcctaaagaagcgctagctatgattaatgggacctcagtcatgactggcatcgcagctaactgcgtatacgacacccagatcctgactgcgattgcaatgggtgttcacgctctggatatccaggccctgaacggcaccaaccagtctttccacccgtttatccataactctaagccgcacccaggtcagctgtgggcggctgatcagatgatatcattgctggctaactcgcaactggtacgggacgagctggacggcaaacatgattaccgcgaccacgagctgatccaggatcgttatagcctgcgttgccttccgcagtacctgggtccgattgtggacggtatctcacagatagcaaaacaaatcgaaattgaaattaactccgttactgataaccctctgattgacgtcgataaccaggcgtcgtaccacggcggaaatttcctgggtcagtatgttggcatgggtatggaccaccttcgctactatatcggcctgctggcgaaacacctggatgtgcagattgcgctgctagctagtcccgaatttagcaacggactgccgccatctttattgggcaaccgtgaacgtaaggttaacatgggtctgaaaggtttacaaatctgtggcaattccatcatgccgctgctgacgttctacggcaatagcatcgccgaccgctttccgacccatgcagagcaattcaaccagaatatcaactctcagggctacacctccgcaacgctggcgcgacgtagtgttgatatcttccaaaactacgttgcgattgccctgatgtttggcgtccaggctgtagacctgaggacttataaaaagactggccattacgatgcgcgtgcttgcctctctccggctaccgaacgcctgtattccgccgtgcgtcacgtagttggtcagaaacctacttcagatcgcccatacatctggaacgataacgagcagggtctggatgaacacatcgctcgcatctccgctgacattgccgctggcggagtaattgttcaagctgtacaggatatcctgccgtgcctgcactaaccggcttatcggtcagtttcacctgatttacgtaaaaacccgcttcggcgggtttttgcttttggaggggcagaaagatgaatgactgtccacgacgctatacccaaaagaaa

SEQ ID NO: 271 - DNA, 5122 bp, synthetic construct
  source 1..5122: mol_type = other DNA
aggctaggtggaggctcagtgatgataagtctgcgatggtggatgcatgtgtcatggtcatagctgtttcctgtgtgaaattgttatccgctcagagggcacaatcctattccgcgctatccgacaatctccaagacattaggtggagttcagttcggcgagcggaaatggcttacgaacggggcggagatttcctggaagatgccaggaagatacttaacagggaagtgagagggccgcggcaaagccgtttttccataggctccgcccccctgacaagcatcacgaaatctgacgctcaaatcagtggtggcgaaacccgacaggactataaagataccaggcgtttccccctggcggctccctcgtgcgctctcctgttcctgcctttcggtttaccggtgtcattccgctgttatggccgcgtttgtctcattccacgcctgacactcagttccgggtaggcagttcgctccaagctggactgtatgcacgaaccccccgttcagtccgaccgctgcgccttatccggtaactatcgtcttgagtccaacccggaaagacatgcaaaagcaccactggcagcagccactggtaattgatttagaggagttagtcttgaagtcatgcgccggttaaggctaaactgaaaggacaagttttggtgactgcgctcctccaagccagttacctcggttcaaagagttggtagctcagagaaccttcgaaaaaccgccctgcaaggcggttttttcgttttcagagcaagagattacgcgcagaccaaaacgatctcaagaagatcatcttattaagtctgacgctctattcaacaaagccgccgtccatgggtagggggcttcaaatcgtcctcgtgataccaattcggagcctgcttttttgtacaaacttgttgataatggcaattcaaggatcttcacctagatccttttaaattaaaaatgaagttttaaatcaatctaaagtatatatgagtaaacttggtctgacagttaccaatgcttaatcagtgaggcacctatctcagcgatctgtctatttcgttcatccatagttgcctgactccccgtcgtgtagataactacgatacgggagggcttaccatctggccccagtgctgcaatgataccgcgagagccacgctcaccggctccagatttatcagcaataaaccagccagccggaagggccgagcgcagaagtggtcctgcaactttatccgcctccatccagtctattaattgttgccgggaagctagagtaagtagttcgccagttaatagtttgcgcaacgttgttgccattgctacaggcatcgtggtgtcacgctcgtcgtttggtatggcttcattcagctccggttcccaacgatcaaggcgagttacatgatcccccatgttgtgcaaaaaagcggttagctccttcggtcctccgatcgttgtcagaagtaagttggccgcagtgttatcactcatggttatggcagcactgcataattctcttactgtcatgccatccgtaagatgcttttctgtgactggtgagtactcaaccaagtcattctgagaatagtgtatgcggcgaccgagttgctcttgcccggcgtcaatacgggataataccgcgccacatagcagaactttaaaagtgctcatcattggaaaacgttcttcggggcgaaaactctcaaggatcttaccgctgttgagatccagttcgatgtaacccactcgtgcacccaactgatcttcagcatcttttactttcaccagcgtttctgggtgagcaaaaacaggaaggcaaaatgccgcaaaaaagggaataagggcgacacggaaatgttgaatactcatactcttcctttttcaatattattgaagcatttatcagggttattgtctcatgagcggatacatatttgaatgtatttagaaaaataaacaaataggggttccgcgcacatttccccgaaaagtgccagatacctgaaacaaaacccatcgtacggccaaggaagtctccaataactgtgatccaccacaagcgccagggttttcccagtcacgacgttgtaaaacgacggccagtcatgcataatccgcacgcatctggaataaggaagtgccattccgcctgacctttgcctatgaggaccaaaacgaaaaaacaccctttcgggtgtcttttctggaatttggtaccgagaggctccatgattcagtatgacttgcctttggtcgaaaaaaaaagcccgcactgtcaggtgcgggcttttttctgtgtttccttattaggacccactttcacatttaagttgtttttctaatccgcatatgatcaattcaaggccgaataagaaggctggctctgcaccttggtgatcaaataattcgatagcttgtcgtaataatggcggcatactatcagtagtaggtgtttccctttcttctttagcgacttgatgctcttgatcttccaatacgcaacctaaagtaaaatgccccacagcgctgagtgcatataatgcattctctagtgaaaaaccttgttggcataaaaaggctaattgattttcgagagtttcatactgtttttctgtaggccgtgtacctaaatgtacttttgctccatcgcgatgacttagtaaagcacatctaaaacttttagcgttattacgtaaaaaatcttgccagctttccccttctaaagggcaaaagtgagtatggtgcctatctaacatctcaatggctaaggcgtcgagcaaagcccgcttattttttacatgccaatacaatgtaggctgctctacacctagcttctgggcgagtttacgggttgttaaaccttcgattccgacctcattaagcagctctaatgcgctgttaatcactttacttttatctaatctggacatattcaccaccctgaattgactctcttccgggcgctatcatgccataccgcgaaaggttttgcgccattcgatggcgcgccgccattgcttgtgcaatgtacatcagagattttgagacacaaccaattattgaaggcctccctaacggggggcctttttttgtttctggtcccccgcttaacgatcgttggctgttttcagcaggacgcactgacctccctatcagtgatagagattgacatccctatcagtgatagagatactgagcacagctgtcaccggatgtgctttccggtctgatgagtccgtgaggacgaaacagcctctacaaataattttgtttaaatcacacgggtaaggaggtatttaaatgaaaacactgtcccaagcacagtcgaagacgagtagccagcagttttctttcaccggtaattctagcgctaacgtgattatcggcaaccagaaactaactatcaacgacgtcgcccgcgttgctcggaacgggaccttagtaagcctgactaacaacactgatatacttcaaggcattcaggcgtcctgtgattatatcaataacgcagttgagtctggtgaaccaatttacggtgtgacctcaggcttcggcggtatggcgaacgttgctatcagccgtgaacaggcctccgaactgcaaagtaatatggtatggtttcaaaaaactggtgctgggaacaaactccctttggcggacgtacgtgcagcaatgctgctgcgcgccaactcgcatatgcgtggcgcgtccggtatccgtctggagctgatcaaacgtatggaaatcttcttgaacgctggtgttactccgtacgtttatgaatttggatctatcggcgcttctggagatctggtcccgctgagctacattacgggttccctgattggccttgacccgagcttcaaggtggatttcaacggcaaagaaatggacgccccgaccgcgttacgccagttaaatctgtctcccctgacacttctgcctaaagaagccctagctatggtcaatgggacctcagtcatgactggcatcgcagctaactgcgtatacgacacccagatcctgactgcgattgcaatgggtgttcacgctctggatatccaggccctgaacggcaccaaccagtctttccacccgtttatccataactctaagccgcacccaggtcagctgtgggcggctgatcagatgatatcattgctggctaactcgcaactggtacgggacgagctggacggcaaacatgattaccgcgaccacgagctgatccaggatcgttatagcctgcgttgccttccgcagtacctgggtccgattgtggacggtatctcacagatagcaaaacaaatcgaaattgaaattaactccgttactgataaccctctgattgacgtcgataaccaggcgtcgtaccacggcggaaatttcctgggtcagtatgttggcatgggtatggaccaccttcgctactatatcggcctgctggcgaaacacctggatgtgcagattgcgctgctagctagtcccgaatttagcaacggactgccgccatctttattgggcaaccgtgaacgtaaggttaacatgggtctgaaaggtttacaaatctgtggcaattccatcatgccgctgctgacgttctacggcaatagcatcgccgaccgctttccgacccatgcagagcaattcaaccagaatatcaactctcagggctacacctccgcaacgctggcgcgacgtagtgttgatatcttccaaaactacgttgcgattgccctgatgtttggcgtccaggctgtagacctgaggacttataaaaagactggccattacgatgcgcgtgcttgcctctctccggctaccgaacgcctgtattccgccgtgcgtcacgtagttggtcagaaacctacttcagatcgcccatacatctggaacgataacgagcagggtctggatgaacacatcgctcgcatctccgctgacattgccgctggcggagtaattgttcaagctgtacaggatatcctgccgtgcctgcactaaccggcttatcggtcagtttcacctgatttacgtaaaaacccgcttcggcgggtttttgcttttggaggggcagaaagatgaatgactgtccacgacgctatacccaaaagaaa

SEQ ID NO: 272 - DNA, 5122 bp, synthetic construct
  source 1..5122: mol_type = other DNA
aggctaggtggaggctcagtgatgataagtctgcgatggtggatgcatgtgtcatggtcatagctgtttcctgtgtgaaattgttatccgctcagagggcacaatcctattccgcgctatccgacaatctccaagacattaggtggagttcagttcggcgagcggaaatggcttacgaacggggcggagatttcctggaagatgccaggaagatacttaacagggaagtgagagggccgcggcaaagccgtttttccataggctccgcccccctgacaagcatcacgaaatctgacgctcaaatcagtggtggcgaaacccgacaggactataaagataccaggcgtttccccctggcggctccctcgtgcgctctcctgttcctgcctttcggtttaccggtgtcattccgctgttatggccgcgtttgtctcattccacgcctgacactcagttccgggtaggcagttcgctccaagctggactgtatgcacgaaccccccgttcagtccgaccgctgcgccttatccggtaactatcgtcttgagtccaacccggaaagacatgcaaaagcaccactggcagcagccactggtaattgatttagaggagttagtcttgaagtcatgcgccggttaaggctaaactgaaaggacaagttttggtgactgcgctcctccaagccagttacctcggttcaaagagttggtagctcagagaaccttcgaaaaaccgccctgcaaggcggttttttcgttttcagagcaagagattacgcgcagaccaaaacgatctcaagaagatcatcttattaagtctgacgctctattcaacaaagccgccgtccatgggtagggggcttcaaatcgtcctcgtgataccaattcggagcctgcttttttgtacaaacttgttgataatggcaattcaaggatcttcacctagatccttttaaattaaaaatgaagttttaaatcaatctaaagtatatatgagtaaacttggtctgacagttaccaatgcttaatcagtgaggcacctatctcagcgatctgtctatttcgttcatccatagttgcctgactccccgtcgtgtagataactacgatacgggagggcttaccatctggccccagtgctgcaatgataccgcgagagccacgctcaccggctccagatttatcagcaataaaccagccagccggaagggccgagcgcagaagtggtcctgcaactttatccgcctccatccagtctattaattgttgccgggaagctagagtaagtagttcgccagttaatagtttgcgcaacgttgttgccattgctacaggcatcgtggtgtcacgctcgtcgtttggtatggcttcattcagctccggttcccaacgatcaaggcgagttacatgatcccccatgttgtgcaaaaaagcggttagctccttcggtcctccgatcgttgtcagaagtaagttggccgcagtgttatcactcatggttatggcagcactgcataattctcttactgtcatgccatccgtaagatgcttttctgtgactggtgagtactcaaccaagtcattctgagaatagtgtatgcggcgaccgagttgctcttgcccggcgtcaatacgggataataccgcgccacatagcagaactttaaaagtgctcatcattggaaaacgttcttcggggcgaaaactctcaaggatcttaccgctgttgagatccagttcgatgtaacccactcgtgcacccaactgatcttcagcatcttttactttcaccagcgtttctgggtgagcaaaaacaggaaggcaaaatgccgcaaaaaagggaataagggcgacacggaaatgttgaatactcatactcttcctttttcaatattattgaagcatttatcagggttattgtctcatgagcggatacatatttgaatgtatttagaaaaataaacaaataggggttccgcgcacatttccccgaaaagtgccagatacctgaaacaaaacccatcgtacggccaaggaagtctccaataactgtgatccaccacaagcgccagggttttcccagtcacgacgttgtaaaacgacggccagtcatgcataatccgcacgcatctggaataaggaagtgccattccgcctgacctttgcctatgaggaccaaaacgaaaaaacaccctttcgggtgtcttttctggaatttggtaccgagaggctccatgattcagtatgacttgcctttggtcgaaaaaaaaagcccgcactgtcaggtgcgggcttttttctgtgtttccttattaggacccactttcacatttaagttgtttttctaatccgcatatgatcaattcaaggccgaataagaaggctggctctgcaccttggtgatcaaataattcgatagcttgtcgtaataatggcggcatactatcagtagtaggtgtttccctttcttctttagcgacttgatgctcttgatcttccaatacgcaacctaaagtaaaatgccccacagcgctgagtgcatataatgcattctctagtgaaaaaccttgttggcataaaaaggctaattgattttcgagagtttcatactgtttttctgtaggccgtgtacctaaatgtacttttgctccatcgcgatgacttagtaaagcacatctaaaacttttagcgttattacgtaaaaaatcttgccagctttccccttctaaagggcaaaagtgagtatggtgcctatctaacatctcaatggctaaggcgtcgagcaaagcccgcttattttttacatgccaatacaatgtaggctgctctacacctagcttctgggcgagtttacgggttgttaaaccttcgattccgacctcattaagcagctctaatgcgctgttaatcactttacttttatctaatctggacatattcaccaccctgaattgactctcttccgggcgctatcatgccataccgcgaaaggttttgcgccattcgatggcgcgccgccattgcttgtgcaatgtacatcagagattttgagacacaaccaattattgaaggcctccctaacggggggcctttttttgtttctggtcccccgcttaacgatcgttggctgttttcagcaggacgcactgacctccctatcagtgatagagattgacatccctatcagtgatagagatactgagcacagctgtcaccggatgtgctttccggtctgatgagtccgtgaggacgaaacagcctctacaaataattttgtttaaatcacacgggtaaggaggtatttaaatgaaaacactgtcccaagcacagtcgaagacgagtagccagcagttttctttcaccggtaattctagcgctaacgtgattatcggcaaccagaaactaactatcaacgacgtcgcccgcgttgctcggaacgggaccttagtaagcctgactaacaacactgatatacttcaaggcattcaggcgtcctgtgattatatcaataacgcagttgagtctggtgaaccaatttacggtgtgacctcaggcttcggcggtatggcgaacgttgctatcagccgtgaacaggcctccgaactgcaagagaatgtggtatggtttatgaaaactggtgctgggaacaaactccctttggcggacgtacgtgcagcaatgctgctgcgcgccaactcgcatatgcgtggcgcgtccggtatccgtctggagctgatcaaacgtatggaaatcttcttgaacgctggtgttactccgtacgtttatgaatttggatctatcggcgcttctggagatctggtcccgctgagctacattacgggttccctgattggccttgacccgagcttcaaggtggatttcaacggcaaagaaatggacgccccgaccgcgttacgccagttaaatctgtctcccctgacacttctgcctaaagaaggtctagctatgattaatgggacctcagtcatgactggcatcgcagctaactgcgtatacgacacccagatcctgactgcgattgcaatgggtgttcacgctctggatatccaggccctgaacggcaccaaccagtctttccacccgtttatccataactctaagccgcacccaggtcagctgtgggcggctgatcagatgatatcattgctggctaactcgcaactggtacgggacgagctggacggcaaacatgattaccgcgaccacgagctgatccaggatcgttatagcctgcgttgccttccgcagtacctgggtccgattgtggacggtatctcacagatagcaaaacaaatcgaaattgaaattaactccgttactgataaccctctgattgacgtcgataaccaggcgtcgtaccacggcggaaatttcctgggtcagtatgttggcatgggtatggaccaccttcgctactatatcggcctgctggcgaaacacctggatgtgcagattgcgctgctagctagtcccgaatttagcaacggactgccgccatctttattgggcaaccgtgaacgtaaggttaacatgggtctgaaaggtttacaaatctgtggcaattccatcatgccgctgctgacgttctacggcaatagcatcgccgaccgctttccgacccatgcagagcaattcaaccagaatatcaactctcagggctacacctccgcaacgctggcgcgacgtagtgttgatatcttccaaaactacgttgcgattgccctgatgtttggcgtccaggctgtagacctgaggacttataaaaagactggccattacgatgcgcgtgcttgcctctctccggctaccgaacgcctgtattccgccgtgcgtcacgtagttggtcagaaacctacttcagatcgcccatacatctggaacgataacgagcagggtctggatgaacacatcgctcgcatctccgctgacattgccgctggcggagtaattgttcaagctgtacaggatatcctgccgtgcctgcactaaccggcttatcggtcagtttcacctgatttacgtaaaaacccgcttcggcgggtttttgcttttggaggggcagaaagatgaatgactgtccacgacgctatacccaaaagaaa

SEQ ID NO: 273 - DNA, 5122 bp, synthetic construct
  source 1..5122: mol_type = other DNA
aggctaggtggaggctcagtgatgataagtctgcgatggtggatgcatgtgtcatggtcatagctgtttcctgtgtgaaattgttatccgctcagagggcacaatcctattccgcgctatccgacaatctccaagacattaggtggagttcagttcggcgagcggaaatggcttacgaacggggcggagatttcctggaagatgccaggaagatacttaacagggaagtgagagggccgcggcaaagccgtttttccataggctccgcccccctgacaagcatcacgaaatctgacgctcaaatcagtggtggcgaaacccgacaggactataaagataccaggcgtttccccctggcggctccctcgtgcgctctcctgttcctgcctttcggtttaccggtgtcattccgctgttatggccgcgtttgtctcattccacgcctgacactcagttccgggtaggcagttcgctccaagctggactgtatgcacgaaccccccgttcagtccgaccgctgcgccttatccggtaactatcgtcttgagtccaacccggaaagacatgcaaaagcaccactggcagcagccactggtaattgatttagaggagttagtcttgaagtcatgcgccggttaaggctaaactgaaaggacaagttttggtgactgcgctcctccaagccagttacctcggttcaaagagttggtagctcagagaaccttcgaaaaaccgccctgcaaggcggttttttcgttttcagagcaagagattacgcgcagaccaaaacgatctcaagaagatcatcttattaagtctgacgctctattcaacaaagccgccgtccatgggtagggggcttcaaatcgtcctcgtgataccaattcggagcctgcttttttgtacaaacttgttgataatggcaattcaaggatcttcacctagatccttttaaattaaaaatgaagttttaaatcaatctaaagtatatatgagtaaacttggtctgacagttaccaatgcttaatcagtgaggcacctatctcagcgatctgtctatttcgttcatccatagttgcctgactccccgtcgtgtagataactacgatacgggagggcttaccatctggccccagtgctgcaatgataccgcgagagccacgctcaccggctccagatttatcagcaataaaccagccagccggaagggccgagcgcagaagtggtcctgcaactttatccgcctccatccagtctattaattgttgccgggaagctagagtaagtagttcgccagttaatagtttgcgcaacgttgttgccattgctacaggcatcgtggtgtcacgctcgtcgtttggtatggcttcattcagctccggttcccaacgatcaaggcgagttacatgatcccccatgttgtgcaaaaaagcggttagctccttcggtcctccgatcgttgtcagaagtaagttggccgcagtgttatcactcatggttatggcagcactgcataattctcttactgtcatgccatccgtaagatgcttttctgtgactggtgagtactcaaccaagtcattctgagaatagtgtatgcggcgaccgagttgctcttgcccggcgtcaatacgggataataccgcgccacatagcagaactttaaaagtgctcatcattggaaaacgttcttcggggcgaaaactctcaaggatcttaccgctgttgagatccagttcgatgtaacccactcgtgcacccaactgatcttcagcatcttttactttcaccagcgtttctgggtgagcaaaaacaggaaggcaaaatgccgcaaaaaagggaataagggcgacacggaaatgttgaatactcatactcttcctttttcaatattattgaagcatttatcagggttattgtctcatgagcggatacatatttgaatgtatttagaaaaataaacaaataggggttccgcgcacatttccccgaaaagtgccagatacctgaaacaaaacccatcgtacggccaaggaagtctccaataactgtgatccaccacaagcgccagggttttcccagtcacgacgttgtaaaacgacggccagtcatgcataatccgcacgcatctggaataaggaagtgccattccgcctgacctttgcctatgaggaccaaaacgaaaaaacaccctttcgggtgtcttttctggaatttggtaccgagaggctccatgattcagtatgacttgcctttggtcgaaaaaaaaagcccgcactgtcaggtgcgggcttttttctgtgtttccttattaggacccactttcacatttaagttgtttttctaatccgcatatgatcaattcaaggccgaataagaaggctggctctgcaccttggtgatcaaataattcgatagcttgtcgtaataatggcggcatactatcagtagtaggtgtttccctttcttctttagcgacttgatgctcttgatcttccaatacgcaacctaaagtaaaatgccccacagcgctgagtgcatataatgcattctctagtgaaaaaccttgttggcataaaaaggctaattgattttcgagagtttcatactgtttttctgtaggccgtgtacctaaatgtacttttgctccatcgcgatgacttagtaaagcacatctaaaacttttagcgttattacgtaaaaaatcttgccagctttccccttctaaagggcaaaagtgagtatggtgcctatctaacatctcaatggctaaggcgtcgagcaaagcccgcttattttttacatgccaatacaatgtaggctgctctacacctagcttctgggcgagtttacgggttgttaaaccttcgattccgacctcattaagcagctctaatgcgctgttaatcactttacttttatctaatctggacatattcaccaccctgaattgactctcttccgggcgctatcatgccataccgcgaaaggttttgcgccattcgatggcgcgccgccattgcttgtgcaatgtacatcagagattttgagacacaaccaattattgaaggcctccctaacggggggcctttttttgtttctggtcccccgcttaacgatcgttggctgttttcagcaggacgcactgacctccctatcagtgatagagattgacatccctatcagtgatagagatactgagcacagctgtcaccggatgtgctttccggtctgatgagtccgtgaggacgaaacagcctctacaaataattttgtttaaatcacacgggtaaggaggtatttaaatgaaaacactgtcccaagcacagtcgaagacgagtagccagcagttttctttcaccggtaattctagcgctaacgtgattatcggcaaccagaaactaactatcaacgacgtcgcccgcgttgctcggaacgggaccttagtaagcctgactaacaacactgatatacttcaaggcattcaggcgtcctgtgattatatcaataacgcagttgagtctggtgaaccaatttacggtgtgacctcaggcttcggcggtatggcgaacgttgctatcagccgtgaacaggcctccgaactgcaaaccaatttggtatggtatgtgaaaactggtgctgggaacaaactccctttggcggacgtacgtgcagcaatgctgctgcgcgccaactcgcatatgcgtggcgcgtccggtatccgtctggagctgatcaaacgtatggaaatcttcttgaacgctggtgttactccgtacgtttatgaatttggatctatcggcgcttctggagatctggtcccgctgagctacattacgggttccctgattggccttgacccgagcttcaaggtggatttcaacggcaaagaaatggacgccccgaccgcgttacgccagttaaatctgtctcccctgacacttctgcctaaagaaggtctagctatggtcaatgggacctcagtcatgactggcatcgcagctaactgcgtatacgacacccagatcctgactgcgattgcaatgggtgttcacgctctggatatccaggccctgaacggcaccaaccagtctttccacccgtttatccataactctaagccgcacccaggtcagctgtgggcggctgatcagatgatatcattgctggctaactcgcaactggtacgggacgagctggacggcaaacatgattaccgcgaccacgagctgatccaggatcgttatagcctgcgttgccttccgcagtacctgggtccgattgtggacggtatctcacagatagcaaaacaaatcgaaattgaaattaactccgttactgataaccctctgattgacgtcgataaccaggcgtcgtaccacggcggaaatttcctgggtcagtatgttggcatgggtatggaccaccttcgctactatatcggcctgctggcgaaacacctggatgtgcagattgcgctgctagctagtcccgaatttagcaacggactgccgccatctttattgggcaaccgtgaacgtaaggttaacatgggtctgaaaggtttacaaatctgtggcaattccatcatgccgctgctgacgttctacggcaatagcatcgccgaccgctttccgacccatgcagagcaattcaaccagaatatcaactctcagggctacacctccgcaacgctggcgcgacgtagtgttgatatcttccaaaactacgttgcgattgccctgatgtttggcgtccaggctgtagacctgaggacttataaaaagactggccattacgatgcgcgtgcttgcctctctccggctaccgaacgcctgtattccgccgtgcgtcacgtagttggtcagaaacctacttcagatcgcccatacatctggaacgataacgagcagggtctggatgaacacatcgctcgcatctccgctgacattgccgctggcggagtaattgttcaagctgtacaggatatcctgccgtgcctgcactaaccggcttatcggtcagtttcacctgatttacgtaaaaacccgcttcggcgggtttttgcttttggaggggcagaaagatgaatgactgtccacgacgctatacccaaaagaaa

SEQ ID NO: 274 - DNA, 5122 bp, synthetic construct
  source 1..5122: mol_type = other DNA
aggctaggtggaggctcagtgatgataagtctgcgatggtggatgcatgtgtcatggtcatagctgtttcctgtgtgaaattgttatccgctcagagggcacaatcctattccgcgctatccgacaatctccaagacattaggtggagttcagttcggcgagcggaaatggcttacgaacggggcggagatttcctggaagatgccaggaagatacttaacagggaagtgagagggccgcggcaaagccgtttttccataggctccgcccccctgacaagcatcacgaaatctgacgctcaaatcagtggtggcgaaacccgacaggactataaagataccaggcgtttccccctggcggctccctcgtgcgctctcctgttcctgcctttcggtttaccggtgtcattccgctgttatggccgcgtttgtctcattccacgcctgacactcagttccgggtaggcagttcgctccaagctggactgtatgcacgaaccccccgttcagtccgaccgctgcgccttatccggtaactatcgtcttgagtccaacccggaaagacatgcaaaagcaccactggcagcagccactggtaattgatttagaggagttagtcttgaagtcatgcgccggttaaggctaaactgaaaggacaagttttggtgactgcgctcctccaagccagttacctcggttcaaagagttggtagctcagagaaccttcgaaaaaccgccctgcaaggcggttttttcgttttcagagcaagagattacgcgcagaccaaaacgatctcaagaagatcatcttattaagtctgacgctctattcaacaaagccgccgtccatgggtagggggcttcaaatcgtcctcgtgataccaattcggagcctgcttttttgtacaaacttgttgataatggcaattcaaggatcttcacctagatccttttaaattaaaaatgaagttttaaatcaatctaaagtatatatgagtaaacttggtctgacagttaccaatgcttaatcagtgaggcacctatctcagcgatctgtctatttcgttcatccatagttgcctgactccccgtcgtgtagataactacgatacgggagggcttaccatctggccccagtgctgcaatgataccgcgagagccacgctcaccggctccagatttatcagcaataaaccagccagccggaagggccgagcgcagaagtggtcctgcaactttatccgcctccatccagtctattaattgttgccgggaagctagagtaagtagttcgccagttaatagtttgcgcaacgttgttgccattgctacaggcatcgtggtgtcacgctcgtcgtttggtatggcttcattcagctccggttcccaacgatcaaggcgagttacatgatcccccatgttgtgcaaaaaagcggttagctccttcggtcctccgatcgttgtcagaagtaagttggccgcagtgttatcactcatggttatggcagcactgcataattctcttactgtcatgccatccgtaagatgcttttctgtgactggtgagtactcaaccaagtcattctgagaatagtgtatgcggcgaccgagttgctcttgcccggcgtcaatacgggataataccgcgccacatagcagaactttaaaagtgctcatcattggaaaacgttcttcggggcgaaaactctcaaggatcttaccgctgttgagatccagttcgatgtaacccactcgtgcacccaactgatcttcagcatcttttactttcaccagcgtttctgggtgagcaaaaacaggaaggcaaaatgccgcaaaaaagggaataagggcgacacggaaatgttgaatactcatactcttcctttttcaatattattgaagcatttatcagggttattgtctcatgagcggatacatatttgaatgtatttagaaaaataaacaaataggggttccgcgcacatttccccgaaaagtgccagatacctgaaacaaaacccatcgtacggccaaggaagtctccaataactgtgatccaccacaagcgccagggttttcccagtcacgacgttgtaaaacgacggccagtcatgcataatccgcacgcatctggaataaggaagtgccattccgcctgacctttgcctatgaggaccaaaacgaaaaaacaccctttcgggtgtcttttctggaatttggtaccgagaggctccatgattcagtatgacttgcctttggtcgaaaaaaaaagcccgcactgtcaggtgcgggcttttttctgtgtttccttattaggacccactttcacatttaagttgtttttctaatccgcatatgatcaattcaaggccgaataagaaggctggctctgcaccttggtgatcaaataattcgatagcttgtcgtaataatggcggcatactatcagtagtaggtgtttccctttcttctttagcgacttgatgctcttgatcttccaatacgcaacctaaagtaaaatgccccacagcgctgagtgcatataatgcattctctagtgaaaaaccttgttggcataaaaaggctaattgattttcgagagtttcatactgtttttctgtaggccgtgtacctaaatgtacttttgctccatcgcgatgacttagtaaagcacatctaaaacttttagcgttattacgtaaaaaatcttgccagctttccccttctaaagggcaaaagtgagtatggtgcctatctaacatctcaatggctaaggcgtcgagcaaagcccgcttattttttacatgccaatacaatgtaggctgctctacacctagcttctgggcgagtttacgggttgttaaaccttcgattccgacctcattaagcagctctaatgcgctgttaatcactttacttttatctaatctggacatattcaccaccctgaattgactctcttccgggcgctatcatgccataccgcgaaaggttttgcgccattcgatggcgcgccgccattgcttgtgcaatgtacatcagagattttgagacacaaccaattattgaaggcctccctaacggggggcctttttttgtttctggtcccccgcttaacgatcgttggctgttttcagcaggacgcactgacctccctatcagtgatagagattgacatccctatcagtgatagagatactgagcacagctgtcaccggatgtgctttccggtctgatgagtccgtgaggacgaaacagcctctacaaataattttgtttaaatcacacgggtaaggaggtatttaaatgaaaacactgtcccaagcacagtcgaagacgagtagccagcagttttctttcaccggtaattctagcgctaacgtgattatcggcaaccagaaactaactatcaacgacgtcgcccgcgttgctcggaacgggaccttagtaagcctgactaacaacactgatatacttcaaggcattcaggcgtcctgtgattatatcaataacgcagttgagtctggtgaaccaatttacggtgtgacctcaggcttcggcggtatggcgaacgttgctatcagccgtgaacaggcctccgaactgcaaaccaatgcggtatggcatgtgaaaactggtgctgggaacaaactccctttggcggacgtacgtgcagcaatgctgctgcgcgccaactcgcatatgcgtggcgcgtccggtatccgtctggagctgatcaaacgtatggaaatcttcttgaacgctggtgttactccgtacgtttatgaatttggatctatcggcgcttctggagatctggtcccgctgagctacattacgggttccctgattggccttgacccgagcttcaaggtggatttcaacggcaaagaaatggacgccccgaccgcgttacgccagttaaatctgtctcccctgacacttctgcctaaagaagcgctagctatgacgaatgggacctcagtcatgactggcatcgcagctaactgcgtatacgacacccagatcctgactgcgattgcaatgggtgttcacgctctggatatccaggccctgaacggcaccaaccagtctttccacccgtttatccataactctaagccgcacccaggtcagctgtgggcggctgatcagatgatatcattgctggctaactcgcaactggtacgggacgagctggacggcaaacatgattaccgcgaccacgagctgatccaggatcgttatagcctgcgttgccttccgcagtacctgggtccgattgtggacggtatctcacagatagcaaaacaaatcgaaattgaaattaactccgttactgataaccctctgattgacgtcgataaccaggcgtcgtaccacggcggaaatttcctgggtcagtatgttggcatgggtatggaccaccttcgctactatatcggcctgctggcgaaacacctggatgtgcagattgcgctgctagctagtcccgaatttagcaacggactgccgccatctttattgggcaaccgtgaacgtaaggttaacatgggtctgaaaggtttacaaatctgtggcaattccatcatgccgctgctgacgttctacggcaatagcatcgccgaccgctttccgacccatgcagagcaattcaaccagaatatcaactctcagggctacacctccgcaacgctggcgcgacgtagtgttgatatcttccaaaactacgttgcgattgccctgatgtttggcgtccaggctgtagacctgaggacttataaaaagactggccattacgatgcgcgtgcttgcctctctccggctaccgaacgcctgtattccgccgtgcgtcacgtagttggtcagaaacctacttcagatcgcccatacatctggaacgataacgagcagggtctggatgaacacatcgctcgcatctccgctgacattgccgctggcggagtaattgttcaagctgtacaggatatcctgccgtgcctgcactaaccggcttatcggtcagtttcacctgatttacgtaaaaacccgcttcggcgggtttttgcttttggaggggcagaaagatgaatgactgtccacgacgctatacccaaaagaaa

SEQ ID NO: 275 - DNA, 5122 bp, synthetic construct
  source 1..5122: mol_type = other DNA
aggctaggtggaggctcagtgatgataagtctgcgatggtggatgcatgtgtcatggtcatagctgtttcctgtgtgaaattgttatccgctcagagggcacaatcctattccgcgctatccgacaatctccaagacattaggtggagttcagttcggcgagcggaaatggcttacgaacggggcggagatttcctggaagatgccaggaagatacttaacagggaagtgagagggccgcggcaaagccgtttttccataggctccgcccccctgacaagcatcacgaaatctgacgctcaaatcagtggtggcgaaacccgacaggactataaagataccaggcgtttccccctggcggctccctcgtgcgctctcctgttcctgcctttcggtttaccggtgtcattccgctgttatggccgcgtttgtctcattccacgcctgacactcagttccgggtaggcagttcgctccaagctggactgtatgcacgaaccccccgttcagtccgaccgctgcgccttatccggtaactatcgtcttgagtccaacccggaaagacatgcaaaagcaccactggcagcagccactggtaattgatttagaggagttagtcttgaagtcatgcgccggttaaggctaaactgaaaggacaagttttggtgactgcgctcctccaagccagttacctcggttcaaagagttggtagctcagagaaccttcgaaaaaccgccctgcaaggcggttttttcgttttcagagcaagagattacgcgcagaccaaaacgatctcaagaagatcatcttattaagtctgacgctctattcaacaaagccgccgtccatgggtagggggcttcaaatcgtcctcgtgataccaattcggagcctgcttttttgtacaaacttgttgataatggcaattcaaggatcttcacctagatccttttaaattaaaaatgaagttttaaatcaatctaaagtatatatgagtaaacttggtctgacagttaccaatgcttaatcagtgaggcacctatctcagcgatctgtctatttcgttcatccatagttgcctgactccccgtcgtgtagataactacgatacgggagggcttaccatctggccccagtgctgcaatgataccgcgagagccacgctcaccggctccagatttatcagcaataaaccagccagccggaagggccgagcgcagaagtggtcctgcaactttatccgcctccatccagtctattaattgttgccgggaagctagagtaagtagttcgccagttaatagtttgcgcaacgttgttgccattgctacaggcatcgtggtgtcacgctcgtcgtttggtatggcttcattcagctccggttcccaacgatcaaggcgagttacatgatcccccatgttgtgcaaaaaagcggttagctccttcggtcctccgatcgttgtcagaagtaagttggccgcagtgttatcactcatggttatggcagcactgcataattctcttactgtcatgccatccgtaagatgcttttctgtgactggtgagtactcaaccaagtcattctgagaatagtgtatgcggcgaccgagttgctcttgcccggcgtcaatacgggataataccgcgccacatagcagaactttaaaagtgctcatcattggaaaacgttcttcggggcgaaaactctcaaggatcttaccgctgttgagatccagttcgatgtaacccactcgtgcacccaactgatcttcagcatcttttactttcaccagcgtttctgggtgagcaaaaacaggaaggcaaaatgccgcaaaaaagggaataagggcgacacggaaatgttgaatactcatactcttcctttttcaatattattgaagcatttatcagggttattgtctcatgagcggatacatatttgaatgtatttagaaaaataaacaaataggggttccgcgcacatttccccgaaaagtgccagatacctgaaacaaaacccatcgtacggccaaggaagtctccaataactgtgatccaccacaagcgccagggttttcccagtcacgacgttgtaaaacgacggccagtcatgcataatccgcacgcatctggaataaggaagtgccattccgcctgacctttgcctatgaggaccaaaacgaaaaaacaccctttcgggtgtcttttctggaatttggtaccgagaggctccatgattcagtatgacttgcctttggtcgaaaaaaaaagcccgcactgtcaggtgcgggcttttttctgtgtttccttattaggacccactttcacatttaagttgtttttctaatccgcatatgatcaattcaaggccgaataagaaggctggctctgcaccttggtgatcaaataattcgatagcttgtcgtaataatggcggcatactatcagtagtaggtgtttccctttcttctttagcgacttgatgctcttgatcttccaatacgcaacctaaagtaaaatgccccacagcgctgagtgcatataatgcattctctagtgaaaaaccttgttggcataaaaaggctaattgattttcgagagtttcatactgtttttctgtaggccgtgtacctaaatgtacttttgctccatcgcgatgacttagtaaagcacatctaaaacttttagcgttattacgtaaaaaatcttgccagctttccccttctaaagggcaaaagtgagtatggtgcctatctaacatctcaatggctaaggcgtcgagcaaagcccgcttattttttacatgccaatacaatgtaggctgctctacacctagcttctgggcgagtttacgggttgttaaaccttcgattccgacctcattaagcagctctaatgcgctgttaatcactttacttttatctaatctggacatattcaccaccctgaattgactctcttccgggcgctatcatgccataccgcgaaaggttttgcgccattcgatggcgcgccgccattgcttgtgcaatgtacatcagagattttgagacacaaccaattattgaaggcctccctaacggggggcctttttttgtttctggtcccccgcttaacgatcgttggctgttttcagcaggacgcactgacctccctatcagtgatagagattgacatccctatcagtgatagagatactgagcacagctgtcaccggatgtgctttccggtctgatgagtccgtgaggacgaaacagcctctacaaataattttgtttaaatcacacgggtaaggaggtatttaaatgaaaacactgtcccaagcacagtcgaagacgagtagccagcagttttctttcaccggtaattctagcgctaacgtgattatcggcaaccagaaactaactatcaacgacgtcgcccgcgttgctcggaacgggaccttagtaagcctgactaacaacactgatatacttcaaggcattcaggcgtcctgtgattatatcaataacgcagttgagtctggtgaaccaatttacggtgtgacctcaggcttcggcggtatggcgaacgttgctatcagccgtgaacaggcctccgaactgcaaaagaatgcggtatggcacacgaaaactggtgctgggaacaaactccctttggcggacgtacgtgcagcaatgctgctgcgcgccaactcgcatatgcgtggcgcgtccggtatccgtctggagctgatcaaacgtatggaaatcttcttgaacgctggtgttactccgtacgtttatgaatttggatctatcggcgcttctggagatctggtcccgctgagctacattacgggttccctgattggccttgacccgagcttcaaggtggatttcaacggcaaagaaatggacgccccgaccgcgttacgccagttaaatctgtctcccctgacacttctgcctaaagaagccctagctatgatgaatgggacctcagtcatgactggcatcgcagctaactgcgtatacgacacccagatcctgactgcgattgcaatgggtgttcacgctctggatatccaggccctgaacggcaccaaccagtctttccacccgtttatccataactctaagccgcacccaggtcagctgtgggcggctgatcagatgatatcattgctggctaactcgcaactggtacgggacgagctggacggcaaacatgattaccgcgaccacgagctgatccaggatcgttatagcctgcgttgccttccgcagtacctgggtccgattgtggacggtatctcacagatagcaaaacaaatcgaaattgaaattaactccgttactgataaccctctgattgacgtcgataaccaggcgtcgtaccacggcggaaatttcctgggtcagtatgttggcatgggtatggaccaccttcgctactatatcggcctgctggcgaaacacctggatgtgcagattgcgctgctagctagtcccgaatttagcaacggactgccgccatctttattgggcaaccgtgaacgtaaggttaacatgggtctgaaaggtttacaaatctgtggcaattccatcatgccgctgctgacgttctacggcaatagcatcgccgaccgctttccgacccatgcagagcaattcaaccagaatatcaactctcagggctacacctccgcaacgctggcgcgacgtagtgttgatatcttccaaaactacgttgcgattgccctgatgtttggcgtccaggctgtagacctgaggacttataaaaagactggccattacgatgcgcgtgcttgcctctctccggctaccgaacgcctgtattccgccgtgcgtcacgtagttggtcagaaacctacttcagatcgcccatacatctggaacgataacgagcagggtctggatgaacacatcgctcgcatctccgctgacattgccgctggcggagtaattgttcaagctgtacaggatatcctgccgtgcctgcactaaccggcttatcggtcagtttcacctgatttacgtaaaaacccgcttcggcgggtttttgcttttggaggggcagaaagatgaatgactgtccacgacgctatacccaaaagaaa

SEQ ID NO: 276 - DNA, 5122 bp, synthetic construct
  source 1..5122: mol_type = other DNA
aggctaggtggaggctcagtgatgataagtctgcgatggtggatgcatgtgtcatggtcatagctgtttcctgtgtgaaattgttatccgctcagagggcacaatcctattccgcgctatccgacaatctccaagacattaggtggagttcagttcggcgagcggaaatggcttacgaacggggcggagatttcctggaagatgccaggaagatacttaacagggaagtgagagggccgcggcaaagccgtttttccataggctccgcccccctgacaagcatcacgaaatctgacgctcaaatcagtggtggcgaaacccgacaggactataaagataccaggcgtttccccctggcggctccctcgtgcgctctcctgttcctgcctttcggtttaccggtgtcattccgctgttatggccgcgtttgtctcattccacgcctgacactcagttccgggtaggcagttcgctccaagctggactgtatgcacgaaccccccgttcagtccgaccgctgcgccttatccggtaactatcgtcttgagtccaacccggaaagacatgcaaaagcaccactggcagcagccactggtaattgatttagaggagttagtcttgaagtcatgcgccggttaaggctaaactgaaaggacaagttttggtgactgcgctcctccaagccagttacctcggttcaaagagttggtagctcagagaaccttcgaaaaaccgccctgcaaggcggttttttcgttttcagagcaagagattacgcgcagaccaaaacgatctcaagaagatcatcttattaagtctgacgctctattcaacaaagccgccgtccatgggtagggggcttcaaatcgtcctcgtgataccaattcggagcctgcttttttgtacaaacttgttgataatggcaattcaaggatcttcacctagatccttttaaattaaaaatgaagttttaaatcaatctaaagtatatatgagtaaacttggtctgacagttaccaatgcttaatcagtgaggcacctatctcagcgatctgtctatttcgttcatccatagttgcctgactccccgtcgtgtagataactacgatacgggagggcttaccatctggccccagtgctgcaatgataccgcgagagccacgctcaccggctccagatttatcagcaataaaccagccagccggaagggccgagcgcagaagtggtcctgcaactttatccgcctccatccagtctattaattgttgccgggaagctagagtaagtagttcgccagttaatagtttgcgcaacgttgttgccattgctacaggcatcgtggtgtcacgctcgtcgtttggtatggcttcattcagctccggttcccaacgatcaaggcgagttacatgatcccccatgttgtgcaaaaaagcggttagctccttcggtcctccgatcgttgtcagaagtaagttggccgcagtgttatcactcatggttatggcagcactgcataattctcttactgtcatgccatccgtaagatgcttttctgtgactggtgagtactcaaccaagtcattctgagaatagtgtatgcggcgaccgagttgctcttgcccggcgtcaatacgggataataccgcgccacatagcagaactttaaaagtgctcatcattggaaaacgttcttcggggcgaaaactctcaaggatcttaccgctgttgagatccagttcgatgtaacccactcgtgcacccaactgatcttcagcatcttttactttcaccagcgtttctgggtgagcaaaaacaggaaggcaaaatgccgcaaaaaagggaataagggcgacacggaaatgttgaatactcatactcttcctttttcaatattattgaagcatttatcagggttattgtctcatgagcggatacatatttgaatgtatttagaaaaataaacaaataggggttccgcgcacatttccccgaaaagtgccagatacctgaaacaaaacccatcgtacggccaaggaagtctccaataactgtgatccaccacaagcgccagggttttcccagtcacgacgttgtaaaacgacggccagtcatgcataatccgcacgcatctggaataaggaagtgccattccgcctgacctttgcctatgaggaccaaaacgaaaaaacaccctttcgggtgtcttttctggaatttggtaccgagaggctccatgattcagtatgacttgcctttggtcgaaaaaaaaagcccgcactgtcaggtgcgggcttttttctgtgtttccttattaggacccactttcacatttaagttgtttttctaatccgcatatgatcaattcaaggccgaataagaaggctggctctgcaccttggtgatcaaataattcgatagcttgtcgtaataatggcggcatactatcagtagtaggtgtttccctttcttctttagcgacttgatgctcttgatcttccaatacgcaacctaaagtaaaatgccccacagcgctgagtgcatataatgcattctctagtgaaaaaccttgttggcataaaaaggctaattgattttcgagagtttcatactgtttttctgtaggccgtgtacctaaatgtacttttgctccatcgcgatgacttagtaaagcacatctaaaacttttagcgttattacgtaaaaaatcttgccagctttccccttctaaagggcaaaagtgagtatggtgcctatctaacatctcaatggctaaggcgtcgagcaaagcccgcttattttttacatgccaatacaatgtaggctgctctacacctagcttctgggcgagtttacgggttgttaaaccttcgattccgacctcattaagcagctctaatgcgctgttaatcactttacttttatctaatctggacatattcaccaccctgaattgactctcttccgggcgctatcatgccataccgcgaaaggttttgcgccattcgatggcgcgccgccattgcttgtgcaatgtacatcagagattttgagacacaaccaattattgaaggcctccctaacggggggcctttttttgtttctggtcccccgcttaacgatcgttggctgttttcagcaggacgcactgacctccctatcagtgatagagattgacatccctatcagtgatagagatactgagcacagctgtcaccggatgtgctttccggtctgatgagtccgtgaggacgaaacagcctctacaaataattttgtttaaatcacacgggtaaggaggtatttaaatgaaaacactgtcccaagcacagtcgaagacgagtagccagcagttttctttcaccggtaattctagcgctaacgtgattatcggcaaccagaaactaactatcaacgacgtcgcccgcgttgctcggaacgggaccttagtaagcctgactaacaacactgatatacttcaaggcattcaggcgtcctgtgattatatcaataacgcagttgagtctggtgaaccaatttacggtgtgacctcaggcttcggcggtatggcgaacgttgctatcagccgtgaacaggcctccgaactgcaaaccaatttggtatggtttatgaaaactggtgctgggaacaaactccctttggcggacgtacgtgcagcaatgctgctgcgcgccaactcgcatatgcgtggcgcgtccggtatccgtctggagctgatcaaacgtatggaaatcttcttgaacgctggtgttactccgtacgtttatgaatttggatctatcggcgcttctggagatctggtcccgctgagctacattacgggttccctgattggccttgacccgagcttcaaggtggatttcaacggcaaagaaatggacgccccgaccgcgttacgccagttaaatctgtctcccctgacacttctgcctaaagaaagtctagctatgattaatgggacctcagtcatgactggcatcgcagctaactgcgtatacgacacccagatcctgactgcgattgcaatgggtgttcacgctctggatatccaggccctgaacggcaccaaccagtctttccacccgtttatccataactctaagccgcacccaggtcagctgtgggcggctgatcagatgatatcattgctggctaactcgcaactggtacgggacgagctggacggcaaacatgattaccgcgaccacgagctgatccaggatcgttatagcctgcgttgccttccgcagtacctgggtccgattgtggacggtatctcacagatagcaaaacaaatcgaaattgaaattaactccgttactgataaccctctgattgacgtcgataaccaggcgtcgtaccacggcggaaatttcctgggtcagtatgttggcatgggtatggaccaccttcgctactatatcggcctgctggcgaaacacctggatgtgcagattgcgctgctagctagtcccgaatttagcaacggactgccgccatctttattgggcaaccgtgaacgtaaggttaacatgggtctgaaaggtttacaaatctgtggcaattccatcatgccgctgctgacgttctacggcaatagcatcgccgaccgctttccgacccatgcagagcaattcaaccagaatatcaactctcagggctacacctccgcaacgctggcgcgacgtagtgttgatatcttccaaaactacgttgcgattgccctgatgtttggcgtccaggctgtagacctgaggacttataaaaagactggccattacgatgcgcgtgcttgcctctctccggctaccgaacgcctgtattccgccgtgcgtcacgtagttggtcagaaacctacttcagatcgcccatacatctggaacgataacgagcagggtctggatgaacacatcgctcgcatctccgctgacattgccgctggcggagtaattgttcaagctgtacaggatatcctgccgtgcctgcactaaccggcttatcggtcagtttcacctgatttacgtaaaaacccgcttcggcgggtttttgcttttggaggggcagaaagatgaatgactgtccacgacgctatacccaaaagaaa

SEQ ID NO: 277 - DNA, 5122 bp, synthetic construct
  source 1..5122: mol_type = other DNA
aggctaggtggaggctcagtgatgataagtctgcgatggtggatgcatgtgtcatggtcatagctgtttcctgtgtgaaattgttatccgctcagagggcacaatcctattccgcgctatccgacaatctccaagacattaggtggagttcagttcggcgagcggaaatggcttacgaacggggcggagatttcctggaagatgccaggaagatacttaacagggaagtgagagggccgcggcaaagccgtttttccataggctccgcccccctgacaagcatcacgaaatctgacgctcaaatcagtggtggcgaaacccgacaggactataaagataccaggcgtttccccctggcggctccctcgtgcgctctcctgttcctgcctttcggtttaccggtgtcattccgctgttatggccgcgtttgtctcattccacgcctgacactcagttccgggtaggcagttcgctccaagctggactgtatgcacgaaccccccgttcagtccgaccgctgcgccttatccggtaactatcgtcttgagtccaacccggaaagacatgcaaaagcaccactggcagcagccactggtaattgatttagaggagttagtcttgaagtcatgcgccggttaaggctaaactgaaaggacaagttttggtgactgcgctcctccaagccagttacctcggttcaaagagttggtagctcagagaaccttcgaaaaaccgccctgcaaggcggttttttcgttttcagagcaagagattacgcgcagaccaaaacgatctcaagaagatcatcttattaagtctgacgctctattcaacaaagccgccgtccatgggtagggggcttcaaatcgtcctcgtgataccaattcggagcctgcttttttgtacaaacttgttgataatggcaattcaaggatcttcacctagatccttttaaattaaaaatgaagttttaaatcaatctaaagtatatatgagtaaacttggtctgacagttaccaatgcttaatcagtgaggcacctatctcagcgatctgtctatttcgttcatccatagttgcctgactccccgtcgtgtagataactacgatacgggagggcttaccatctggccccagtgctgcaatgataccgcgagagccacgctcaccggctccagatttatcagcaataaaccagccagccggaagggccgagcgcagaagtggtcctgcaactttatccgcctccatccagtctattaattgttgccgggaagctagagtaagtagttcgccagttaatagtttgcgcaacgttgttgccattgctacaggcatcgtggtgtcacgctcgtcgtttggtatggcttcattcagctccggttcccaacgatcaaggcgagttacatgatcccccatgttgtgcaaaaaagcggttagctccttcggtcctccgatcgttgtcagaagtaagttggccgcagtgttatcactcatggttatggcagcactgcataattctcttactgtcatgccatccgtaagatgcttttctgtgactggtgagtactcaaccaagtcattctgagaatagtgtatgcggcgaccgagttgctcttgcccggcgtcaatacgggataataccgcgccacatagcagaactttaaaagtgctcatcattggaaaacgttcttcggggcgaaaactctcaaggatcttaccgctgttgagatccagttcgatgtaacccactcgtgcacccaactgatcttcagcatcttttactttcaccagcgtttctgggtgagcaaaaacaggaaggcaaaatgccgcaaaaaagggaataagggcgacacggaaatgttgaatactcatactcttcctttttcaatattattgaagcatttatcagggttattgtctcatgagcggatacatatttgaatgtatttagaaaaataaacaaataggggttccgcgcacatttccccgaaaagtgccagatacctgaaacaaaacccatcgtacggccaaggaagtctccaataactgtgatccaccacaagcgccagggttttcccagtcacgacgttgtaaaacgacggccagtcatgcataatccgcacgcatctggaataaggaagtgccattccgcctgacctttgcctatgaggaccaaaacgaaaaaacaccctttcgggtgtcttttctggaatttggtaccgagaggctccatgattcagtatgacttgcctttggtcgaaaaaaaaagcccgcactgtcaggtgcgggcttttttctgtgtttccttattaggacccactttcacatttaagttgtttttctaatccgcatatgatcaattcaaggccgaataagaaggctggctctgcaccttggtgatcaaataattcgatagcttgtcgtaataatggcggcatactatcagtagtaggtgtttccctttcttctttagcgacttgatgctcttgatcttccaatacgcaacctaaagtaaaatgccccacagcgctgagtgcatataatgcattctctagtgaaaaaccttgttggcataaaaaggctaattgattttcgagagtttcatactgtttttctgtaggccgtgtacctaaatgtacttttgctccatcgcgatgacttagtaaagcacatctaaaacttttagcgttattacgtaaaaaatcttgccagctttccccttctaaagggcaaaagtgagtatggtgcctatctaacatctcaatggctaaggcgtcgagcaaagcccgcttattttttacatgccaatacaatgtaggctgctctacacctagcttctgggcgagtttacgggttgttaaaccttcgattccgacctcattaagcagctctaatgcgctgttaatcactttacttttatctaatctggacatattcaccaccctgaattgactctcttccgggcgctatcatgccataccgcgaaaggttttgcgccattcgatggcgcgccgccattgcttgtgcaatgtacatcagagattttgagacacaaccaattattgaaggcctccctaacggggggcctttttttgtttctggtcccccgcttaacgatcgttggctgttttcagcaggacgcactgacctccctatcagtgatagagattgacatccctatcagtgatagagatactgagcacagctgtcaccggatgtgctttccggtctgatgagtccgtgaggacgaaacagcctctacaaataattttgtttaaatcacacgggtaaggaggtatttaaatgaaaacactgtcccaagcacagtcgaagacgagtagccagcagttttctttcaccggtaattctagcgctaacgtgattatcggcaaccagaaactaactatcaacgacgtcgcccgcgttgctcggaacgggaccttagtaagcctgactaacaacactgatatacttcaaggcattcaggcgtcctgtgattatatcaataacgcagttgagtctggtgaaccaatttacggtgtgacctcaggcttcggcggtatggcgaacgttgctatcagccgtgaacaggcctccgaactgcaaaccaatgtggtatggcatcacaaaactggtgctgggaacaaactccctttggcggacgtacgtgcagcaatgctgctgcgcgccaactcgcatatgcgtggcgcgtccggtatccgtctggagctgatcaaacgtatggaaatcttcttgaacgctggtgttactccgtacgtttatgaatttggatctatcggcgcttctggagatctggtcccgctgagctacattacgggttccctgattggccttgacccgagcttcaaggtggatttcaacggcaaagaaatggacgccccgaccgcgttacgccagttaaatctgtctcccctgacacttctgcctaaagaaggtctagctatgttaaatgggacctcagtcatgactggcatcgcagctaactgcgtatacgacacccagatcctgactgcgattgcaatgggtgttcacgctctggatatccaggccctgaacggcaccaaccagtctttccacccgtttatccataactctaagccgcacccaggtcagctgtgggcggctgatcagatgatatcattgctggctaactcgcaactggtacgggacgagctggacggcaaacatgattaccgcgaccacgagctgatccaggatcgttatagcctgcgttgccttccgcagtacctgggtccgattgtggacggtatctcacagatagcaaaacaaatcgaaattgaaattaactccgttactgataaccctctgattgacgtcgataaccaggcgtcgtaccacggcggaaatttcctgggtcagtatgttggcatgggtatggaccaccttcgctactatatcggcctgctggcgaaacacctggatgtgcagattgcgctgctagctagtcccgaatttagcaacggactgccgccatctttattgggcaaccgtgaacgtaaggttaacatgggtctgaaaggtttacaaatctgtggcaattccatcatgccgctgctgacgttctacggcaatagcatcgccgaccgctttccgacccatgcagagcaattcaaccagaatatcaactctcagggctacacctccgcaacgctggcgcgacgtagtgttgatatcttccaaaactacgttgcgattgccctgatgtttggcgtccaggctgtagacctgaggacttataaaaagactggccattacgatgcgcgtgcttgcctctctccggctaccgaacgcctgtattccgccgtgcgtcacgtagttggtcagaaacctacttcagatcgcccatacatctggaacgataacgagcagggtctggatgaacacatcgctcgcatctccgctgacattgccgctggcggagtaattgttcaagctgtacaggatatcctgccgtgcctgcactaaccggcttatcggtcagtttcacctgatttacgtaaaaacccgcttcggcgggtttttgcttttggaggggcagaaagatgaatgactgtccacgacgctatacccaaaagaaa

SEQ ID NO: 278 - DNA, 5122 bp, synthetic construct
  source 1..5122: mol_type = other DNA
aggctaggtggaggctcagtgatgataagtctgcgatggtggatgcatgtgtcatggtcatagctgtttcctgtgtgaaattgttatccgctcagagggcacaatcctattccgcgctatccgacaatctccaagacattaggtggagttcagttcggcgagcggaaatggcttacgaacggggcggagatttcctggaagatgccaggaagatacttaacagggaagtgagagggccgcggcaaagccgtttttccataggctccgcccccctgacaagcatcacgaaatctgacgctcaaatcagtggtggcgaaacccgacaggactataaagataccaggcgtttccccctggcggctccctcgtgcgctctcctgttcctgcctttcggtttaccggtgtcattccgctgttatggccgcgtttgtctcattccacgcctgacactcagttccgggtaggcagttcgctccaagctggactgtatgcacgaaccccccgttcagtccgaccgctgcgccttatccggtaactatcgtcttgagtccaacccggaaagacatgcaaaagcaccactggcagcagccactggtaattgatttagaggagttagtcttgaagtcatgcgccggttaaggctaaactgaaaggacaagttttggtgactgcgctcctccaagccagttacctcggttcaaagagttggtagctcagagaaccttcgaaaaaccgccctgcaaggcggttttttcgttttcagagcaagagattacgcgcagaccaaaacgatctcaagaagatcatcttattaagtctgacgctctattcaacaaagccgccgtccatgggtagggggcttcaaatcgtcctcgtgataccaattcggagcctgcttttttgtacaaacttgttgataatggcaattcaaggatcttcacctagatccttttaaattaaaaatgaagttttaaatcaatctaaagtatatatgagtaaacttggtctgacagttaccaatgcttaatcagtgaggcacctatctcagcgatctgtctatttcgttcatccatagttgcctgactccccgtcgtgtagataactacgatacgggagggcttaccatctggccccagtgctgcaatgataccgcgagagccacgctcaccggctccagatttatcagcaataaaccagccagccggaagggccgagcgcagaagtggtcctgcaactttatccgcctccatccagtctattaattgttgccgggaagctagagtaagtagttcgccagttaatagtttgcgcaacgttgttgccattgctacaggcatcgtggtgtcacgctcgtcgtttggtatggcttcattcagctccggttcccaacgatcaaggcgagttacatgatcccccatgttgtgcaaaaaagcggttagctccttcggtcctccgatcgttgtcagaagtaagttggccgcagtgttatcactcatggttatggcagcactgcataattctcttactgtcatgccatccgtaagatgcttttctgtgactggtgagtactcaaccaagtcattctgagaatagtgtatgcggcgaccgagttgctcttgcccggcgtcaatacgggataataccgcgccacatagcagaactttaaaagtgctcatcattggaaaacgttcttcggggcgaaaactctcaaggatcttaccgctgttgagatccagttcgatgtaacccactcgtgcacccaactgatcttcagcatcttttactttcaccagcgtttctgggtgagcaaaaacaggaaggcaaaatgccgcaaaaaagggaataagggcgacacggaaatgttgaatactcatactcttcctttttcaatattattgaagcatttatcagggttattgtctcatgagcggatacatatttgaatgtatttagaaaaataaacaaataggggttccgcgcacatttccccgaaaagtgccagatacctgaaacaaaacccatcgtacggccaaggaagtctccaataactgtgatccaccacaagcgccagggttttcccagtcacgacgttgtaaaacgacggccagtcatgcataatccgcacgcatctggaataaggaagtgccattccgcctgacctttgcctatgaggaccaaaacgaaaaaacaccctttcgggtgtcttttctggaatttggtaccgagaggctccatgattcagtatgacttgcctttggtcgaaaaaaaaagcccgcactgtcaggtgcgggcttttttctgtgtttccttattaggacccactttcacatttaagttgtttttctaatccgcatatgatcaattcaaggccgaataagaaggctggctctgcaccttggtgatcaaataattcgatagcttgtcgtaataatggcggcatactatcagtagtaggtgtttccctttcttctttagcgacttgatgctcttgatcttccaatacgcaacctaaagtaaaatgccccacagcgctgagtgcatataatgcattctctagtgaaaaaccttgttggcataaaaaggctaattgattttcgagagtttcatactgtttttctgtaggccgtgtacctaaatgtacttttgctccatcgcgatgacttagtaaagcacatctaaaacttttagcgttattacgtaaaaaatcttgccagctttccccttctaaagggcaaaagtgagtatggtgcctatctaacatctcaatggctaaggcgtcgagcaaagcccgcttattttttacatgccaatacaatgtaggctgctctacacctagcttctgggcgagtttacgggttgttaaaccttcgattccgacctcattaagcagctctaatgcgctgttaatcactttacttttatctaatctggacatattcaccaccctgaattgactctcttccgggcgctatcatgccataccgcgaaaggttttgcgccattcgatggcgcgccgccattgcttgtgcaatgtacatcagagattttgagacacaaccaattattgaaggcctccctaacggggggcctttttttgtttctggtcccccgcttaacgatcgttggctgttttcagcaggacgcactgacctccctatcagtgatagagattgacatccctatcagtgatagagatactgagcacagctgtcaccggatgtgctttccggtctgatgagtccgtgaggacgaaacagcctctacaaataattttgtttaaatcacacgggtaaggaggtatttaaatgaaaacactgtcccaagcacagtcgaagacgagtagccagcagttttctttcaccggtaattctagcgctaacgtgattatcggcaaccagaaactaactatcaacgacgtcgcccgcgttgctcggaacgggaccttagtaagcctgactaacaacactgatatacttcaaggcattcaggcgtcctgtgattatatcaataacgcagttgagtctggtgaaccaatttacggtgtgacctcaggcttcggcggtatggcgaacgttgctatcagccgtgaacaggcctccgaactgcaacataatttggtatggcacctgaaaactggtgctgggaacaaactccctttggcggacgtacgtgcagcaatgctgctgcgcgccaactcgcatatgcgtggcgcgtccggtatccgtctggagctgatcaaacgtatggaaatcttcttgaacgctggtgttactccgtacgtttatgaatttggatctatcggcgcttctggagatctggtcccgctgagctacattacgggttccctgattggccttgacccgagcttcaaggtggatttcaacggcaaagaaatggacgccccgaccgcgttacgccagttaaatctgtctcccctgacacttctgcctaaagaagccattgctatggtcaatgggacctcagtcatgactggcatcgcagctaactgcgtatacgacacccagatcctgactgcgattgcaatgggtgttcacgctctggatatccaggccctgaacggcaccaaccagtctttccacccgtttatccataactctaagccgcacccaggtcagctgtgggcggctgatcagatgatatcattgctggctaactcgcaactggtacgggacgagctggacggcaaacatgattaccgcgaccacgagctgatccaggatcgttatagcctgcgttgccttccgcagtacctgggtccgattgtggacggtatctcacagatagcaaaacaaatcgaaattgaaattaactccgttactgataaccctctgattgacgtcgataaccaggcgtcgtaccacggcggaaatttcctgggtcagtatgttggcatgggtatggaccaccttcgctactatatcggcctgctggcgaaacacctggatgtgcagattgcgctgctagctagtcccgaatttagcaacggactgccgccatctttattgggcaaccgtgaacgtaaggttaacatgggtctgaaaggtttacaaatctgtggcaattccatcatgccgctgctgacgttctacggcaatagcatcgccgaccgctttccgacccatgcagagcaattcaaccagaatatcaactctcagggctacacctccgcaacgctggcgcgacgtagtgttgatatcttccaaaactacgttgcgattgccctgatgtttggcgtccaggctgtagacctgaggacttataaaaagactggccattacgatgcgcgtgcttgcctctctccggctaccgaacgcctgtattccgccgtgcgtcacgtagttggtcagaaacctacttcagatcgcccatacatctggaacgataacgagcagggtctggatgaacacatcgctcgcatctccgctgacattgccgctggcggagtaattgttcaagctgtacaggatatcctgccgtgcctgcactaaccggcttatcggtcagtttcacctgatttacgtaaaaacccgcttcggcgggtttttgcttttggaggggcagaaagatgaatgactgtccacgacgctatacccaaaagaaa

SEQ ID NO: 279 - DNA, 5122 bp, synthetic construct
  source 1..5122: mol_type = other DNA
aggctaggtggaggctcagtgatgataagtctgcgatggtggatgcatgtgtcatggtcatagctgtttcctgtgtgaaattgttatccgctcagagggcacaatcctattccgcgctatccgacaatctccaagacattaggtggagttcagttcggcgagcggaaatggcttacgaacggggcggagatttcctggaagatgccaggaagatacttaacagggaagtgagagggccgcggcaaagccgtttttccataggctccgcccccctgacaagcatcacgaaatctgacgctcaaatcagtggtggcgaaacccgacaggactataaagataccaggcgtttccccctggcggctccctcgtgcgctctcctgttcctgcctttcggtttaccggtgtcattccgctgttatggccgcgtttgtctcattccacgcctgacactcagttccgggtaggcagttcgctccaagctggactgtatgcacgaaccccccgttcagtccgaccgctgcgccttatccggtaactatcgtcttgagtccaacccggaaagacatgcaaaagcaccactggcagcagccactggtaattgatttagaggagttagtcttgaagtcatgcgccggttaaggctaaactgaaaggacaagttttggtgactgcgctcctccaagccagttacctcggttcaaagagttggtagctcagagaaccttcgaaaaaccgccctgcaaggcggttttttcgttttcagagcaagagattacgcgcagaccaaaacgatctcaagaagatcatcttattaagtctgacgctctattcaacaaagccgccgtccatgggtagggggcttcaaatcgtcctcgtgataccaattcggagcctgcttttttgtacaaacttgttgataatggcaattcaaggatcttcacctagatccttttaaattaaaaatgaagttttaaatcaatctaaagtatatatgagtaaacttggtctgacagttaccaatgcttaatcagtgaggcacctatctcagcgatctgtctatttcgttcatccatagttgcctgactccccgtcgtgtagataactacgatacgggagggcttaccatctggccccagtgctgcaatgataccgcgagagccacgctcaccggctccagatttatcagcaataaaccagccagccggaagggccgagcgcagaagtggtcctgcaactttatccgcctccatccagtctattaattgttgccgggaagctagagtaagtagttcgccagttaatagtttgcgcaacgttgttgccattgctacaggcatcgtggtgtcacgctcgtcgtttggtatggcttcattcagctccggttcccaacgatcaaggcgagttacatgatcccccatgttgtgcaaaaaagcggttagctccttcggtcctccgatcgttgtcagaagtaagttggccgcagtgttatcactcatggttatggcagcactgcataattctcttactgtcatgccatccgtaagatgcttttctgtgactggtgagtactcaaccaagtcattctgagaatagtgtatgcggcgaccgagttgctcttgcccggcgtcaatacgggataataccgcgccacatagcagaactttaaaagtgctcatcattggaaaacgttcttcggggcgaaaactctcaaggatcttaccgctgttgagatccagttcgatgtaacccactcgtgcacccaactgatcttcagcatcttttactttcaccagcgtttctgggtgagcaaaaacaggaaggcaaaatgccgcaaaaaagggaataagggcgacacggaaatgttgaatactcatactcttcctttttcaatattattgaagcatttatcagggttattgtctcatgagcggatacatatttgaatgtatttagaaaaataaacaaataggggttccgcgcacatttccccgaaaagtgccagatacctgaaacaaaacccatcgtacggccaaggaagtctccaataactgtgatccaccacaagcgccagggttttcccagtcacgacgttgtaaaacgacggccagtcatgcataatccgcacgcatctggaataaggaagtgccattccgcctgacctttgcctatgaggaccaaaacgaaaaaacaccctttcgggtgtcttttctggaatttggtaccgagaggctccatgattcagtatgacttgcctttggtcgaaaaaaaaagcccgcactgtcaggtgcgggcttttttctgtgtttccttattaggacccactttcacatttaagttgtttttctaatccgcatatgatcaattcaaggccgaataagaaggctggctctgcaccttggtgatcaaataattcgatagcttgtcgtaataatggcggcatactatcagtagtaggtgtttccctttcttctttagcgacttgatgctcttgatcttccaatacgcaacctaaagtaaaatgccccacagcgctgagtgcatataatgcattctctagtgaaaaaccttgttggcataaaaaggctaattgattttcgagagtttcatactgtttttctgtaggccgtgtacctaaatgtacttttgctccatcgcgatgacttagtaaagcacatctaaaacttttagcgttattacgtaaaaaatcttgccagctttccccttctaaagggcaaaagtgagtatggtgcctatctaacatctcaatggctaaggcgtcgagcaaagcccgcttattttttacatgccaatacaatgtaggctgctctacacctagcttctgggcgagtttacgggttgttaaaccttcgattccgacctcattaagcagctctaatgcgctgttaatcactttacttttatctaatctggacatattcaccaccctgaattgactctcttccgggcgctatcatgccataccgcgaaaggttttgcgccattcgatggcgcgccgccattgcttgtgcaatgtacatcagagattttgagacacaaccaattattgaaggcctccctaacggggggcctttttttgtttctggtcccccgcttaacgatcgttggctgttttcagcaggacgcactgacctccctatcagtgatagagattgacatccctatcagtgatagagatactgagcacagctgtcaccggatgtgctttccggtctgatgagtccgtgaggacgaaacagcctctacaaataattttgtttaaatcacacgggtaaggaggtatttaaatgaaaacactgtcccaagcacagtcgaagacgagtagccagcagttttctttcaccggtaattctagcgctaacgtgattatcggcaaccagaaactaactatcaacgacgtcgcccgcgttgctcggaacgggaccttagtaagcctgactaacaacactgatatacttcaaggcattcaggcgtcctgtgattatatcaataacgcagttgagtctggtgaaccaatttacggtgtgacctcaggcttcggcggtatggcgaacgttgctatcagccgtgaacaggcctccgaactgcaagagaatgtggtatggcatcacaaaactggtgctgggaacaaactccctttggcggacgtacgtgcagcaatgctgctgcgcgccaactcgcatatgcgtggcgcgtccggtatccgtctggagctgatcaaacgtatggaaatcttcttgaacgctggtgttactccgtacgtttatgaatttggatctatcggcgcttctggagatctggtcccgctgagctacattacgggttccctgattggccttgacccgagcttcaaggtggatttcaacggcaaagaaatggacgccccgaccgcgttacgccagttaaatctgtctcccctgacacttctgcctaaagaaggtctagctatgattaatgggacctcagtcatgactggcatcgcagctaactgcgtatacgacacccagatcctgactgcgattgcaatgggtgttcacgctctggatatccaggccctgaacggcaccaaccagtctttccacccgtttatccataactctaagccgcacccaggtcagctgtgggcggctgatcagatgatatcattgctggctaactcgcaactggtacgggacgagctggacggcaaacatgattaccgcgaccacgagctgatccaggatcgttatagcctgcgttgccttccgcagtacctgggtccgattgtggacggtatctcacagatagcaaaacaaatcgaaattgaaattaactccgttactgataaccctctgattgacgtcgataaccaggcgtcgtaccacggcggaaatttcctgggtcagtatgttggcatgggtatggaccaccttcgctactatatcggcctgctggcgaaacacctggatgtgcagattgcgctgctagctagtcccgaatttagcaacggactgccgccatctttattgggcaaccgtgaacgtaaggttaacatgggtctgaaaggtttacaaatctgtggcaattccatcatgccgctgctgacgttctacggcaatagcatcgccgaccgctttccgacccatgcagagcaattcaaccagaatatcaactctcagggctacacctccgcaacgctggcgcgacgtagtgttgatatcttccaaaactacgttgcgattgccctgatgtttggcgtccaggctgtagacctgaggacttataaaaagactggccattacgatgcgcgtgcttgcctctctccggctaccgaacgcctgtattccgccgtgcgtcacgtagttggtcagaaacctacttcagatcgcccatacatctggaacgataacgagcagggtctggatgaacacatcgctcgcatctccgctgacattgccgctggcggagtaattgttcaagctgtacaggatatcctgccgtgcctgcactaaccggcttatcggtcagtttcacctgatttacgtaaaaacccgcttcggcgggtttttgcttttggaggggcagaaagatgaatgactgtccacgacgctatacccaaaagaaa

SEQ ID NO: 280 - DNA, 5122 bp, synthetic construct
  source 1..5122: mol_type = other DNA
aggctaggtggaggctcagtgatgataagtctgcgatggtggatgcatgtgtcatggtcatagctgtttcctgtgtgaaattgttatccgctcagagggcacaatcctattccgcgctatccgacaatctccaagacattaggtggagttcagttcggcgagcggaaatggcttacgaacggggcggagatttcctggaagatgccaggaagatacttaacagggaagtgagagggccgcggcaaagccgtttttccataggctccgcccccctgacaagcatcacgaaatctgacgctcaaatcagtggtggcgaaacccgacaggactataaagataccaggcgtttccccctggcggctccctcgtgcgctctcctgttcctgcctttcggtttaccggtgtcattccgctgttatggccgcgtttgtctcattccacgcctgacactcagttccgggtaggcagttcgctccaagctggactgtatgcacgaaccccccgttcagtccgaccgctgcgccttatccggtaactatcgtcttgagtccaacccggaaagacatgcaaaagcaccactggcagcagccactggtaattgatttagaggagttagtcttgaagtcatgcgccggttaaggctaaactgaaaggacaagttttggtgactgcgctcctccaagccagttacctcggttcaaagagttggtagctcagagaaccttcgaaaaaccgccctgcaaggcggttttttcgttttcagagcaagagattacgcgcagaccaaaacgatctcaagaagatcatcttattaagtctgacgctctattcaacaaagccgccgtccatgggtagggggcttcaaatcgtcctcgtgataccaattcggagcctgcttttttgtacaaacttgttgataatggcaattcaaggatcttcacctagatccttttaaattaaaaatgaagttttaaatcaatctaaagtatatatgagtaaacttggtctgacagttaccaatgcttaatcagtgaggcacctatctcagcgatctgtctatttcgttcatccatagttgcctgactccccgtcgtgtagataactacgatacgggagggcttaccatctggccccagtgctgcaatgataccgcgagagccacgctcaccggctccagatttatcagcaataaaccagccagccggaagggccgagcgcagaagtggtcctgcaactttatccgcctccatccagtctattaattgttgccgggaagctagagtaagtagttcgccagttaatagtttgcgcaacgttgttgccattgctacaggcatcgtggtgtcacgctcgtcgtttggtatggcttcattcagctccggttcccaacgatcaaggcgagttacatgatcccccatgttgtgcaaaaaagcggttagctccttcggtcctccgatcgttgtcagaagtaagttggccgcagtgttatcactcatggttatggcagcactgcataattctcttactgtcatgccatccgtaagatgcttttctgtgactggtgagtactcaaccaagtcattctgagaatagtgtatgcggcgaccgagttgctcttgcccggcgtcaatacgggataataccgcgccacatagcagaactttaaaagtgctcatcattggaaaacgttcttcggggcgaaaactctcaaggatcttaccgctgttgagatccagttcgatgtaacccactcgtgcacccaactgatcttcagcatcttttactttcaccagcgtttctgggtgagcaaaaacaggaaggcaaaatgccgcaaaaaagggaataagggcgacacggaaatgttgaatactcatactcttcctttttcaatattattgaagcatttatcagggttattgtctcatgagcggatacatatttgaatgtatttagaaaaataaacaaataggggttccgcgcacatttccccgaaaagtgccagatacctgaaacaaaacccatcgtacggccaaggaagtctccaataactgtgatccaccacaagcgccagggttttcccagtcacgacgttgtaaaacgacggccagtcatgcataatccgcacgcatctggaataaggaagtgccattccgcctgacctttgcctatgaggaccaaaacgaaaaaacaccctttcgggtgtcttttctggaatttggtaccgagaggctccatgattcagtatgacttgcctttggtcgaaaaaaaaagcccgcactgtcaggtgcgggcttttttctgtgtttccttattaggacccactttcacatttaagttgtttttctaatccgcatatgatcaattcaaggccgaataagaaggctggctctgcaccttggtgatcaaataattcgatagcttgtcgtaataatggcggcatactatcagtagtaggtgtttccctttcttctttagcgacttgatgctcttgatcttccaatacgcaacctaaagtaaaatgccccacagcgctgagtgcatataatgcattctctagtgaaaaaccttgttggcataaaaaggctaattgattttcgagagtttcatactgtttttctgtaggccgtgtacctaaatgtacttttgctccatcgcgatgacttagtaaagcacatctaaaacttttagcgttattacgtaaaaaatcttgccagctttccccttctaaagggcaaaagtgagtatggtgcctatctaacatctcaatggctaaggcgtcgagcaaagcccgcttattttttacatgccaatacaatgtaggctgctctacacctagcttctgggcgagtttacgggttgttaaaccttcgattccgacctcattaagcagctctaatgcgctgttaatcactttacttttatctaatctggacatattcaccaccctgaattgactctcttccgggcgctatcatgccataccgcgaaaggttttgcgccattcgatggcgcgccgccattgcttgtgcaatgtacatcagagattttgagacacaaccaattattgaaggcctccctaacggggggcctttttttgtttctggtcccccgcttaacgatcgttggctgttttcagcaggacgcactgacctccctatcagtgatagagattgacatccctatcagtgatagagatactgagcacagctgtcaccggatgtgctttccggtctgatgagtccgtgaggacgaaacagcctctacaaataattttgtttaaatcacacgggtaaggaggtatttaaatgaaaacactgtcccaagcacagtcgaagacgagtagccagcagttttctttcaccggtaattctagcgctaacgtgattatcggcaaccagaaactaactatcaacgacgtcgcccgcgttgctcggaacgggaccttagtaagcctgactaacaacactgatatacttcaaggcattcaggcgtcctgtgattatatcaataacgcagttgagtctggtgaaccaatttacggtgtgacctcaggcttcggcggtatggcgaacgttgctatcagccgtgaacaggcctccgaactgcaaaccaatgcggtatggtttatgaaaactggtgctgggaacaaactccctttggcggacgtacgtgcagcaatgctgctgcgcgccaactcgcatatgcgtggcgcgtccggtatccgtctggagctgatcaaacgtatggaaatcttcttgaacgctggtgttactccgtacgtttatgaatttggatctatcggcgcttctggagatctggtcccgctgagctacattacgggttccctgattggccttgacccgagcttcaaggtggatttcaacggcaaagaaatggacgccccgaccgcgttacgccagttaaatctgtctcccctgacacttctgcctaaagaaggtattgctatgaataatgggacctcagtcatgactggcatcgcagctaactgcgtatacgacacccagatcctgactgcgattgcaatgggtgttcacgctctggatatccaggccctgaacggcaccaaccagtctttccacccgtttatccataactctaagccgcacccaggtcagctgtgggcggctgatcagatgatatcattgctggctaactcgcaactggtacgggacgagctggacggcaaacatgattaccgcgaccacgagctgatccaggatcgttatagcctgcgttgccttccgcagtacctgggtccgattgtggacggtatctcacagatagcaaaacaaatcgaaattgaaattaactccgttactgataaccctctgattgacgtcgataaccaggcgtcgtaccacggcggaaatttcctgggtcagtatgttggcatgggtatggaccaccttcgctactatatcggcctgctggcgaaacacctggatgtgcagattgcgctgctagctagtcccgaatttagcaacggactgccgccatctttattgggcaaccgtgaacgtaaggttaacatgggtctgaaaggtttacaaatctgtggcaattccatcatgccgctgctgacgttctacggcaatagcatcgccgaccgctttccgacccatgcagagcaattcaaccagaatatcaactctcagggctacacctccgcaacgctggcgcgacgtagtgttgatatcttccaaaactacgttgcgattgccctgatgtttggcgtccaggctgtagacctgaggacttataaaaagactggccattacgatgcgcgtgcttgcctctctccggctaccgaacgcctgtattccgccgtgcgtcacgtagttggtcagaaacctacttcagatcgcccatacatctggaacgataacgagcagggtctggatgaacacatcgctcgcatctccgctgacattgccgctggcggagtaattgttcaagctgtacaggatatcctgccgtgcctgcactaaccggcttatcggtcagtttcacctgatttacgtaaaaacccgcttcggcgggtttttgcttttggaggggcagaaagatgaatgactgtccacgacgctatacccaaaagaaa

SEQ ID NO: 281 - DNA, 5122 bp, synthetic construct
  source 1..5122: mol_type = other DNA
aggctaggtggaggctcagtgatgataagtctgcgatggtggatgcatgtgtcatggtcatagctgtttcctgtgtgaaattgttatccgctcagagggcacaatcctattccgcgctatccgacaatctccaagacattaggtggagttcagttcggcgagcggaaatggcttacgaacggggcggagatttcctggaagatgccaggaagatacttaacagggaagtgagagggccgcggcaaagccgtttttccataggctccgcccccctgacaagcatcacgaaatctgacgctcaaatcagtggtggcgaaacccgacaggactataaagataccaggcgtttccccctggcggctccctcgtgcgctctcctgttcctgcctttcggtttaccggtgtcattccgctgttatggccgcgtttgtctcattccacgcctgacactcagttccgggtaggcagttcgctccaagctggactgtatgcacgaaccccccgttcagtccgaccgctgcgccttatccggtaactatcgtcttgagtccaacccggaaagacatgcaaaagcaccactggcagcagccactggtaattgatttagaggagttagtcttgaagtcatgcgccggttaaggctaaactgaaaggacaagttttggtgactgcgctcctccaagccagttacctcggttcaaagagttggtagctcagagaaccttcgaaaaaccgccctgcaaggcggttttttcgttttcagagcaagagattacgcgcagaccaaaacgatctcaagaagatcatcttattaagtctgacgctctattcaacaaagccgccgtccatgggtagggggcttcaaatcgtcctcgtgataccaattcggagcctgcttttttgtacaaacttgttgataatggcaattcaaggatcttcacctagatccttttaaattaaaaatgaagttttaaatcaatctaaagtatatatgagtaaacttggtctgacagttaccaatgcttaatcagtgaggcacctatctcagcgatctgtctatttcgttcatccatagttgcctgactccccgtcgtgtagataactacgatacgggagggcttaccatctggccccagtgctgcaatgataccgcgagagccacgctcaccggctccagatttatcagcaataaaccagccagccggaagggccgagcgcagaagtggtcctgcaactttatccgcctccatccagtctattaattgttgccgggaagctagagtaagtagttcgccagttaatagtttgcgcaacgttgttgccattgctacaggcatcgtggtgtcacgctcgtcgtttggtatggcttcattcagctccggttcccaacgatcaaggcgagttacatgatcccccatgttgtgcaaaaaagcggttagctccttcggtcctccgatcgttgtcagaagtaagttggccgcagtgttatcactcatggttatggcagcactgcataattctcttactgtcatgccatccgtaagatgcttttctgtgactggtgagtactcaaccaagtcattctgagaatagtgtatgcggcgaccgagttgctcttgcccggcgtcaatacgggataataccgcgccacatagcagaactttaaaagtgctcatcattggaaaacgttcttcggggcgaaaactctcaaggatcttaccgctgttgagatccagttcgatgtaacccactcgtgcacccaactgatcttcagcatcttttactttcaccagcgtttctgggtgagcaaaaacaggaaggcaaaatgccgcaaaaaagggaataagggcgacacggaaatgttgaatactcatactcttcctttttcaatattattgaagcatttatcagggttattgtctcatgagcggatacatatttgaatgtatttagaaaaataaacaaataggggttccgcgcacatttccccgaaaagtgccagatacctgaaacaaaacccatcgtacggccaaggaagtctccaataactgtgatccaccacaagcgccagggttttcccagtcacgacgttgtaaaacgacggccagtcatgcataatccgcacgcatctggaataaggaagtgccattccgcctgacctttgcctatgaggaccaaaacgaaaaaacaccctttcgggtgtcttttctggaatttggtaccgagaggctccatgattcagtatgacttgcctttggtcgaaaaaaaaagcccgcactgtcaggtgcgggcttttttctgtgtttccttattaggacccactttcacatttaagttgtttttctaatccgcatatgatcaattcaaggccgaataagaaggctggctctgcaccttggtgatcaaataattcgatagcttgtcgtaataatggcggcatactatcagtagtaggtgtttccctttcttctttagcgacttgatgctcttgatcttccaatacgcaacctaaagtaaaatgccccacagcgctgagtgcatataatgcattctctagtgaaaaaccttgttggcataaaaaggctaattgattttcgagagtttcatactgtttttctgtaggccgtgtacctaaatgtacttttgctccatcgcgatgacttagtaaagcacatctaaaacttttagcgttattacgtaaaaaatcttgccagctttccccttctaaagggcaaaagtgagtatggtgcctatctaacatctcaatggctaaggcgtcgagcaaagcccgcttattttttacatgccaatacaatgtaggctgctctacacctagcttctgggcgagtttacgggttgttaaaccttcgattccgacctcattaagcagctctaatgcgctgttaatcactttacttttatctaatctggacatattcaccaccctgaattgactctcttccgggcgctatcatgccataccgcgaaaggttttgcgccattcgatggcgcgccgccattgcttgtgcaatgtacatcagagattttgagacacaaccaattattgaaggcctccctaacggggggcctttttttgtttctggtcccccgcttaacgatcgttggctgttttcagcaggacgcactgacctccctatcagtgatagagattgacatccctatcagtgatagagatactgagcacagctgtcaccggatgtgctttccggtctgatgagtccgtgaggacgaaacagcctctacaaataattttgtttaaatcacacgggtaaggaggtatttaaatgaaaacactgtcccaagcacagtcgaagacgagtagccagcagttttctttcaccggtaattctagcgctaacgtgattatcggcaaccagaaactaactatcaacgacgtcgcccgcgttgctcggaacgggaccttagtaagcctgactaacaacactgatatacttcaaggcattcaggcgtcctgtgattatatcaataacgcagttgagtctggtgaaccaatttacggtgtgacctcaggcttcggcggtatggcgaacgttgctatcagccgtgaacaggcctccgaactgcaaaagaatttggtatggtatctgaaaactggtgctgggaacaaactccctttggcggacgtacgtgcagcaatgctgctgcgcgccaactcgcatatgcgtggcgcgtccggtatccgtctggagctgatcaaacgtatggaaatcttcttgaacgctggtgttactccgtacgtttatgaatttggatctatcggcgcttctggagatctggtcccgctgagctacattacgggttccctgattggccttgacccgagcttcaaggtggatttcaacggcaaagaaatggacgccccgaccgcgttacgccagttaaatctgtctcccctgacacttctgcctaaagaaggtattgctatgattaatgggacctcagtcatgactggcatcgcagctaactgcgtatacgacacccagatcctgactgcgattgcaatgggtgttcacgctctggatatccaggccctgaacggcaccaaccagtctttccacccgtttatccataactctaagccgcacccaggtcagctgtgggcggctgatcagatgatatcattgctggctaactcgcaactggtacgggacgagctggacggcaaacatgattaccgcgaccacgagctgatccaggatcgttatagcctgcgttgccttccgcagtacctgggtccgattgtggacggtatctcacagatagcaaaacaaatcgaaattgaaattaactccgttactgataaccctctgattgacgtcgataaccaggcgtcgtaccacggcggaaatttcctgggtcagtatgttggcatgggtatggaccaccttcgctactatatcggcctgctggcgaaacacctggatgtgcagattgcgctgctagctagtcccgaatttagcaacggactgccgccatctttattgggcaaccgtgaacgtaaggttaacatgggtctgaaaggtttacaaatctgtggcaattccatcatgccgctgctgacgttctacggcaatagcatcgccgaccgctttccgacccatgcagagcaattcaaccagaatatcaactctcagggctacacctccgcaacgctggcgcgacgtagtgttgatatcttccaaaactacgttgcgattgccctgatgtttggcgtccaggctgtagacctgaggacttataaaaagactggccattacgatgcgcgtgcttgcctctctccggctaccgaacgcctgtattccgccgtgcgtcacgtagttggtcagaaacctacttcagatcgcccatacatctggaacgataacgagcagggtctggatgaacacatcgctcgcatctccgctgacattgccgctggcggagtaattgttcaagctgtacaggatatcctgccgtgcctgcactaaccggcttatcggtcagtttcacctgatttacgtaaaaacccgcttcggcgggtttttgcttttggaggggcagaaagatgaatgactgtccacgacgctatacccaaaagaaa

SEQ ID NO: 282 - DNA, 5122 bp, synthetic construct
  source 1..5122: mol_type = other DNA
aggctaggtggaggctcagtgatgataagtctgcgatggtggatgcatgtgtcatggtcatagctgtttcctgtgtgaaattgttatccgctcagagggcacaatcctattccgcgctatccgacaatctccaagacattaggtggagttcagttcggcgagcggaaatggcttacgaacggggcggagatttcctggaagatgccaggaagatacttaacagggaagtgagagggccgcggcaaagccgtttttccataggctccgcccccctgacaagcatcacgaaatctgacgctcaaatcagtggtggcgaaacccgacaggactataaagataccaggcgtttccccctggcggctccctcgtgcgctctcctgttcctgcctttcggtttaccggtgtcattccgctgttatggccgcgtttgtctcattccacgcctgacactcagttccgggtaggcagttcgctccaagctggactgtatgcacgaaccccccgttcagtccgaccgctgcgccttatccggtaactatcgtcttgagtccaacccggaaagacatgcaaaagcaccactggcagcagccactggtaattgatttagaggagttagtcttgaagtcatgcgccggttaaggctaaactgaaaggacaagttttggtgactgcgctcctccaagccagttacctcggttcaaagagttggtagctcagagaaccttcgaaaaaccgccctgcaaggcggttttttcgttttcagagcaagagattacgcgcagaccaaaacgatctcaagaagatcatcttattaagtctgacgctctattcaacaaagccgccgtccatgggtagggggcttcaaatcgtcctcgtgataccaattcggagcctgcttttttgtacaaacttgttgataatggcaattcaaggatcttcacctagatccttttaaattaaaaatgaagttttaaatcaatctaaagtatatatgagtaaacttggtctgacagttaccaatgcttaatcagtgaggcacctatctcagcgatctgtctatttcgttcatccatagttgcctgactccccgtcgtgtagataactacgatacgggagggcttaccatctggccccagtgctgcaatgataccgcgagagccacgctcaccggctccagatttatcagcaataaaccagccagccggaagggccgagcgcagaagtggtcctgcaactttatccgcctccatccagtctattaattgttgccgggaagctagagtaagtagttcgccagttaatagtttgcgcaacgttgttgccattgctacaggcatcgtggtgtcacgctcgtcgtttggtatggcttcattcagctccggttcccaacgatcaaggcgagttacatgatcccccatgttgtgcaaaaaagcggttagctccttcggtcctccgatcgttgtcagaagtaagttggccgcagtgttatcactcatggttatggcagcactgcataattctcttactgtcatgccatccgtaagatgcttttctgtgactggtgagtactcaaccaagtcattctgagaatagtgtatgcggcgaccgagttgctcttgcccggcgtcaatacgggataataccgcgccacatagcagaactttaaaagtgctcatcattggaaaacgttcttcggggcgaaaactctcaaggatcttaccgctgttgagatccagttcgatgtaacccactcgtgcacccaactgatcttcagcatcttttactttcaccagcgtttctgggtgagcaaaaacaggaaggcaaaatgccgcaaaaaagggaataagggcgacacggaaatgttgaatactcatactcttcctttttcaatattattgaagcatttatcagggttattgtctcatgagcggatacatatttgaatgtatttagaaaaataaacaaataggggttccgcgcacatttccccgaaaagtgccagatacctgaaacaaaacccatcgtacggccaaggaagtctccaataactgtgatccaccacaagcgccagggttttcccagtcacgacgttgtaaaacgacggccagtcatgcataatccgcacgcatctggaataaggaagtgccattccgcctgacctttgcctatgaggaccaaaacgaaaaaacaccctttcgggtgtcttttctggaatttggtaccgagaggctccatgattcagtatgacttgcctttggtcgaaaaaaaaagcccgcactgtcaggtgcgggcttttttctgtgtttccttattaggacccactttcacatttaagttgtttttctaatccgcatatgatcaattcaaggccgaataagaaggctggctctgcaccttggtgatcaaataattcgatagcttgtcgtaataatggcggcatactatcagtagtaggtgtttccctttcttctttagcgacttgatgctcttgatcttccaatacgcaacctaaagtaaaatgccccacagcgctgagtgcatataatgcattctctagtgaaaaaccttgttggcataaaaaggctaattgattttcgagagtttcatactgtttttctgtaggccgtgtacctaaatgtacttttgctccatcgcgatgacttagtaaagcacatctaaaacttttagcgttattacgtaaaaaatcttgccagctttccccttctaaagggcaaaagtgagtatggtgcctatctaacatctcaatggctaaggcgtcgagcaaagcccgcttattttttacatgccaatacaatgtaggctgctctacacctagcttctgggcgagtttacgggttgttaaaccttcgattccgacctcattaagcagctctaatgcgctgttaatcactttacttttatctaatctggacatattcaccaccctgaattgactctcttccgggcgctatcatgccataccgcgaaaggttttgcgccattcgatggcgcgccgccattgcttgtgcaatgtacatcagagattttgagacacaaccaattattgaaggcctccctaacggggggcctttttttgtttctggtcccccgcttaacgatcgttggctgttttcagcaggacgcactgacctccctatcagtgatagagattgacatccctatcagtgatagagatactgagcacagctgtcaccggatgtgctttccggtctgatgagtccgtgaggacgaaacagcctctacaaataattttgtttaaatcacacgggtaaggaggtatttaaatgaaaacactgtcccaagcacagtcgaagacgagtagccagcagttttctttcaccggtaattctagcgctaacgtgattatcggcaaccagaaactaactatcaacgacgtcgcccgcgttgctcggaacgggaccttagtaagcctgactaacaacactgatatacttcaaggcattcaggcgtcctgtgattatatcaataacgcagttgagtctggtgaaccaatttacggtgtgacctcaggcttcggcggtatggcgaacgttgctatcagccgtgaacaggcctccgaactgcaaaccaatttggtatggtcgcaaaaaactggtgctgggaacaaactccctttggcggacgtacgtgcagcaatgctgctgcgcgccaactcgcatatgcgtggcgcgtccggtatccgtctggagctgatcaaacgtatggaaatcttcttgaacgctggtgttactccgtacgtttatgaatttggatctatcggcgcttctggagatctggtcccgctgagctacattacgggttccctgattggccttgacccgagcttcaaggtggatttcaacggcaaagaaatggacgccccgaccgcgttacgccagttaaatctgtctcccctgacacttctgcctaaagaaggtattgctatggtcaatgggacctcagtcatgactggcatcgcagctaactgcgtatacgacacccagatcctgactgcgattgcaatgggtgttcacgctctggatatccaggccctgaacggcaccaaccagtctttccacccgtttatccataactctaagccgcacccaggtcagctgtgggcggctgatcagatgatatcattgctggctaactcgcaactggtacgggacgagctggacggcaaacatgattaccgcgaccacgagctgatccaggatcgttatagcctgcgttgccttccgcagtacctgggtccgattgtggacggtatctcacagatagcaaaacaaatcgaaattgaaattaactccgttactgataaccctctgattgacgtcgataaccaggcgtcgtaccacggcggaaatttcctgggtcagtatgttggcatgggtatggaccaccttcgctactatatcggcctgctggcgaaacacctggatgtgcagattgcgctgctagctagtcccgaatttagcaacggactgccgccatctttattgggcaaccgtgaacgtaaggttaacatgggtctgaaaggtttacaaatctgtggcaattccatcatgccgctgctgacgttctacggcaatagcatcgccgaccgctttccgacccatgcagagcaattcaaccagaatatcaactctcagggctacacctccgcaacgctggcgcgacgtagtgttgatatcttccaaaactacgttgcgattgccctgatgtttggcgtccaggctgtagacctgaggacttataaaaagactggccattacgatgcgcgtgcttgcctctctccggctaccgaacgcctgtattccgccgtgcgtcacgtagttggtcagaaacctacttcagatcgcccatacatctggaacgataacgagcagggtctggatgaacacatcgctcgcatctccgctgacattgccgctggcggagtaattgttcaagctgtacaggatatcctgccgtgcctgcactaaccggcttatcggtcagtttcacctgatttacgtaaaaacccgcttcggcgggtttttgcttttggaggggcagaaagatgaatgactgtccacgacgctatacccaaaagaaa

SEQ ID NO: 283 - DNA, 5122 bp, synthetic construct
  source 1..5122: mol_type = other DNA
aggctaggtggaggctcagtgatgataagtctgcgatggtggatgcatgtgtcatggtcatagctgtttcctgtgtgaaattgttatccgctcagagggcacaatcctattccgcgctatccgacaatctccaagacattaggtggagttcagttcggcgagcggaaatggcttacgaacggggcggagatttcctggaagatgccaggaagatacttaacagggaagtgagagggccgcggcaaagccgtttttccataggctccgcccccctgacaagcatcacgaaatctgacgctcaaatcagtggtggcgaaacccgacaggactataaagataccaggcgtttccccctggcggctccctcgtgcgctctcctgttcctgcctttcggtttaccggtgtcattccgctgttatggccgcgtttgtctcattccacgcctgacactcagttccgggtaggcagttcgctccaagctggactgtatgcacgaaccccccgttcagtccgaccgctgcgccttatccggtaactatcgtcttgagtccaacccggaaagacatgcaaaagcaccactggcagcagccactggtaattgatttagaggagttagtcttgaagtcatgcgccggttaaggctaaactgaaaggacaagttttggtgactgcgctcctccaagccagttacctcggttcaaagagttggtagctcagagaaccttcgaaaaaccgccctgcaaggcggttttttcgttttcagagcaagagattacgcgcagaccaaaacgatctcaagaagatcatcttattaagtctgacgctctattcaacaaagccgccgtccatgggtagggggcttcaaatcgtcctcgtgataccaattcggagcctgcttttttgtacaaacttgttgataatggcaattcaaggatcttcacctagatccttttaaattaaaaatgaagttttaaatcaatctaaagtatatatgagtaaacttggtctgacagttaccaatgcttaatcagtgaggcacctatctcagcgatctgtctatttcgttcatccatagttgcctgactccccgtcgtgtagataactacgatacgggagggcttaccatctggccccagtgctgcaatgataccgcgagagccacgctcaccggctccagatttatcagcaataaaccagccagccggaagggccgagcgcagaagtggtcctgcaactttatccgcctccatccagtctattaattgttgccgggaagctagagtaagtagttcgccagttaatagtttgcgcaacgttgttgccattgctacaggcatcgtggtgtcacgctcgtcgtttggtatggcttcattcagctccggttcccaacgatcaaggcgagttacatgatcccccatgttgtgcaaaaaagcggttagctccttcggtcctccgatcgttgtcagaagtaagttggccgcagtgttatcactcatggttatggcagcactgcataattctcttactgtcatgccatccgtaagatgcttttctgtgactggtgagtactcaaccaagtcattctgagaatagtgtatgcggcgaccgagttgctcttgcccggcgtcaatacgggataataccgcgccacatagcagaactttaaaagtgctcatcattggaaaacgttcttcggggcgaaaactctcaaggatcttaccgctgttgagatccagttcgatgtaacccactcgtgcacccaactgatcttcagcatcttttactttcaccagcgtttctgggtgagcaaaaacaggaaggcaaaatgccgcaaaaaagggaataagggcgacacggaaatgttgaatactcatactcttcctttttcaatattattgaagcatttatcagggttattgtctcatgagcggatacatatttgaatgtatttagaaaaataaacaaataggggttccgcgcacatttccccgaaaagtgccagatacctgaaacaaaacccatcgtacggccaaggaagtctccaataactgtgatccaccacaagcgccagggttttcccagtcacgacgttgtaaaacgacggccagtcatgcataatccgcacgcatctggaataaggaagtgccattccgcctgacctttgcctatgaggaccaaaacgaaaaaacaccctttcgggtgtcttttctggaatttggtaccgagaggctccatgattcagtatgacttgcctttggtcgaaaaaaaaagcccgcactgtcaggtgcgggcttttttctgtgtttccttattaggacccactttcacatttaagttgtttttctaatccgcatatgatcaattcaaggccgaataagaaggctggctctgcaccttggtgatcaaataattcgatagcttgtcgtaataatggcggcatactatcagtagtaggtgtttccctttcttctttagcgacttgatgctcttgatcttccaatacgcaacctaaagtaaaatgccccacagcgctgagtgcatataatgcattctctagtgaaaaaccttgttggcataaaaaggctaattgattttcgagagtttcatactgtttttctgtaggccgtgtacctaaatgtacttttgctccatcgcgatgacttagtaaagcacatctaaaacttttagcgttattacgtaaaaaatcttgccagctttccccttctaaagggcaaaagtgagtatggtgcctatctaacatctcaatggctaaggcgtcgagcaaagcccgcttattttttacatgccaatacaatgtaggctgctctacacctagcttctgggcgagtttacgggttgttaaaccttcgattccgacctcattaagcagctctaatgcgctgttaatcactttacttttatctaatctggacatattcaccaccctgaattgactctcttccgggcgctatcatgccataccgcgaaaggttttgcgccattcgatggcgcgccgccattgcttgtgcaatgtacatcagagattttgagacacaaccaattattgaaggcctccctaacggggggcctttttttgtttctggtcccccgcttaacgatcgttggctgttttcagcaggacgcactgacctccctatcagtgatagagattgacatccctatcagtgatagagatactgagcacagctgtcaccggatgtgctttccggtctgatgagtccgtgaggacgaaacagcctctacaaataattttgtttaaatcacacgggtaaggaggtatttaaatgaaaacactgtcccaagcacagtcgaagacgagtagccagcagttttctttcaccggtaattctagcgctaacgtgattatcggcaaccagaaactaactatcaacgacgtcgcccgcgttgctcggaacgggaccttagtaagcctgactaacaacactgatatacttcaaggcattcaggcgtcctgtgattatatcaataacgcagttgagtctggtgaaccaatttacggtgtgacctcaggcttcggcggtatggcgaacgttgctatcagccgtgaacaggcctccgaactgcaagagaatattgtatggtatcacaaaactggtgctgggaacaaactccctttggcggacgtacgtgcagcaatgctgctgcgcgccaactcgcatatgcgtggcgcgtccggtatccgtctggagctgatcaaacgtatggaaatcttcttgaacgctggtgttactccgtacgtttatgaatttggatctatcggcgcttctggagatctggtcccgctgagctacattacgggttccctgattggccttgacccgagcttcaaggtggatttcaacggcaaagaaatggacgccccgaccgcgttacgccagttaaatctgtctcccctgacacttctgcctaaagaaggtctagctatgaataatgggacctcagtcatgactggcatcgcagctaactgcgtatacgacacccagatcctgactgcgattgcaatgggtgttcacgctctggatatccaggccctgaacggcaccaaccagtctttccacccgtttatccataactctaagccgcacccaggtcagctgtgggcggctgatcagatgatatcattgctggctaactcgcaactggtacgggacgagctggacggcaaacatgattaccgcgaccacgagctgatccaggatcgttatagcctgcgttgccttccgcagtacctgggtccgattgtggacggtatctcacagatagcaaaacaaatcgaaattgaaattaactccgttactgataaccctctgattgacgtcgataaccaggcgtcgtaccacggcggaaatttcctgggtcagtatgttggcatgggtatggaccaccttcgctactatatcggcctgctggcgaaacacctggatgtgcagattgcgctgctagctagtcccgaatttagcaacggactgccgccatctttattgggcaaccgtgaacgtaaggttaacatgggtctgaaaggtttacaaatctgtggcaattccatcatgccgctgctgacgttctacggcaatagcatcgccgaccgctttccgacccatgcagagcaattcaaccagaatatcaactctcagggctacacctccgcaacgctggcgcgacgtagtgttgatatcttccaaaactacgttgcgattgccctgatgtttggcgtccaggctgtagacctgaggacttataaaaagactggccattacgatgcgcgtgcttgcctctctccggctaccgaacgcctgtattccgccgtgcgtcacgtagttggtcagaaacctacttcagatcgcccatacatctggaacgataacgagcagggtctggatgaacacatcgctcgcatctccgctgacattgccgctggcggagtaattgttcaagctgtacaggatatcctgccgtgcctgcactaaccggcttatcggtcagtttcacctgatttacgtaaaaacccgcttcggcgggtttttgcttttggaggggcagaaagatgaatgactgtccacgacgctatacccaaaagaaa

SEQ ID NO: 284 - DNA, 5122 bp, synthetic construct
  source 1..5122: mol_type = other DNA
aggctaggtggaggctcagtgatgataagtctgcgatggtggatgcatgtgtcatggtcatagctgtttcctgtgtgaaattgttatccgctcagagggcacaatcctattccgcgctatccgacaatctccaagacattaggtggagttcagttcggcgagcggaaatggcttacgaacggggcggagatttcctggaagatgccaggaagatacttaacagggaagtgagagggccgcggcaaagccgtttttccataggctccgcccccctgacaagcatcacgaaatctgacgctcaaatcagtggtggcgaaacccgacaggactataaagataccaggcgtttccccctggcggctccctcgtgcgctctcctgttcctgcctttcggtttaccggtgtcattccgctgttatggccgcgtttgtctcattccacgcctgacactcagttccgggtaggcagttcgctccaagctggactgtatgcacgaaccccccgttcagtccgaccgctgcgccttatccggtaactatcgtcttgagtccaacccggaaagacatgcaaaagcaccactggcagcagccactggtaattgatttagaggagttagtcttgaagtcatgcgccggttaaggctaaactgaaaggacaagttttggtgactgcgctcctccaagccagttacctcggttcaaagagttggtagctcagagaaccttcgaaaaaccgccctgcaaggcggttttttcgttttcagagcaagagattacgcgcagaccaaaacgatctcaagaagatcatcttattaagtctgacgctctattcaacaaagccgccgtccatgggtagggggcttcaaatcgtcctcgtgataccaattcggagcctgcttttttgtacaaacttgttgataatggcaattcaaggatcttcacctagatccttttaaattaaaaatgaagttttaaatcaatctaaagtatatatgagtaaacttggtctgacagttaccaatgcttaatcagtgaggcacctatctcagcgatctgtctatttcgttcatccatagttgcctgactccccgtcgtgtagataactacgatacgggagggcttaccatctggccccagtgctgcaatgataccgcgagagccacgctcaccggctccagatttatcagcaataaaccagccagccggaagggccgagcgcagaagtggtcctgcaactttatccgcctccatccagtctattaattgttgccgggaagctagagtaagtagttcgccagttaatagtttgcgcaacgttgttgccattgctacaggcatcgtggtgtcacgctcgtcgtttggtatggcttcattcagctccggttcccaacgatcaaggcgagttacatgatcccccatgttgtgcaaaaaagcggttagctccttcggtcctccgatcgttgtcagaagtaagttggccgcagtgttatcactcatggttatggcagcactgcataattctcttactgtcatgccatccgtaagatgcttttctgtgactggtgagtactcaaccaagtcattctgagaatagtgtatgcggcgaccgagttgctcttgcccggcgtcaatacgggataataccgcgccacatagcagaactttaaaagtgctcatcattggaaaacgttcttcggggcgaaaactctcaaggatcttaccgctgttgagatccagttcgatgtaacccactcgtgcacccaactgatcttcagcatcttttactttcaccagcgtttctgggtgagcaaaaacaggaaggcaaaatgccgcaaaaaagggaataagggcgacacggaaatgttgaatactcatactcttcctttttcaatattattgaagcatttatcagggttattgtctcatgagcggatacatatttgaatgtatttagaaaaataaacaaataggggttccgcgcacatttccccgaaaagtgccagatacctgaaacaaaacccatcgtacggccaaggaagtctccaataactgtgatccaccacaagcgccagggttttcccagtcacgacgttgtaaaacgacggccagtcatgcataatccgcacgcatctggaataaggaagtgccattccgcctgacctttgcctatgaggaccaaaacgaaaaaacaccctttcgggtgtcttttctggaatttggtaccgagaggctccatgattcagtatgacttgcctttggtcgaaaaaaaaagcccgcactgtcaggtgcgggcttttttctgtgtttccttattaggacccactttcacatttaagttgtttttctaatccgcatatgatcaattcaaggccgaataagaaggctggctctgcaccttggtgatcaaataattcgatagcttgtcgtaataatggcggcatactatcagtagtaggtgtttccctttcttctttagcgacttgatgctcttgatcttccaatacgcaacctaaagtaaaatgccccacagcgctgagtgcatataatgcattctctagtgaaaaaccttgttggcataaaaaggctaattgattttcgagagtttcatactgtttttctgtaggccgtgtacctaaatgtacttttgctccatcgcgatgacttagtaaagcacatctaaaacttttagcgttattacgtaaaaaatcttgccagctttccccttctaaagggcaaaagtgagtatggtgcctatctaacatctcaatggctaaggcgtcgagcaaagcccgcttattttttacatgccaatacaatgtaggctgctctacacctagcttctgggcgagtttacgggttgttaaaccttcgattccgacctcattaagcagctctaatgcgctgttaatcactttacttttatctaatctggacatattcaccaccctgaattgactctcttccgggcgctatcatgccataccgcgaaaggttttgcgccattcgatggcgcgccgccattgcttgtgcaatgtacatcagagattttgagacacaaccaattattgaaggcctccctaacggggggcctttttttgtttctggtcccccgcttaacgatcgttggctgttttcagcaggacgcactgacctccctatcagtgatagagattgacatccctatcagtgatagagatactgagcacagctgtcaccggatgtgctttccggtctgatgagtccgtgaggacgaaacagcctctacaaataattttgtttaaatcacacgggtaaggaggtatttaaatgaaaacactgtcccaagcacagtcgaagacgagtagccagcagttttctttcaccggtaattctagcgctaacgtgattatcggcaaccagaaactaactatcaacgacgtcgcccgcgttgctcggaacgggaccttagtaagcctgactaacaacactgatatacttcaaggcattcaggcgtcctgtgattatatcaataacgcagttgagtctggtgaaccaatttacggtgtgacctcaggcttcggcggtatggcgaacgttgctatcagccgtgaacaggcctccgaactgcaacataatttggtatggtatatgaaaactggtgctgggaacaaactccctttggcggacgtacgtgcagcaatgctgctgcgcgccaactcgcatatgcgtggcgcgtccggtatccgtctggagctgatcaaacgtatggaaatcttcttgaacgctggtgttactccgtacgtttatgaatttggatctatcggcgcttctggagatctggtcccgctgagctacattacgggttccctgattggccttgacccgagcttcaaggtggatttcaacggcaaagaaatggacgccccgaccgcgttacgccagttaaatctgtctcccctgacacttctgcctaaagaaggtctagctatgctcaatgggacctcagtcatgactggcatcgcagctaactgcgtatacgacacccagatcctgactgcgattgcaatgggtgttcacgctctggatatccaggccctgaacggcaccaaccagtctttccacccgtttatccataactctaagccgcacccaggtcagctgtgggcggctgatcagatgatatcattgctggctaactcgcaactggtacgggacgagctggacggcaaacatgattaccgcgaccacgagctgatccaggatcgttatagcctgcgttgccttccgcagtacctgggtccgattgtggacggtatctcacagatagcaaaacaaatcgaaattgaaattaactccgttactgataaccctctgattgacgtcgataaccaggcgtcgtaccacggcggaaatttcctgggtcagtatgttggcatgggtatggaccaccttcgctactatatcggcctgctggcgaaacacctggatgtgcagattgcgctgctagctagtcccgaatttagcaacggactgccgccatctttattgggcaaccgtgaacgtaaggttaacatgggtctgaaaggtttacaaatctgtggcaattccatcatgccgctgctgacgttctacggcaatagcatcgccgaccgctttccgacccatgcagagcaattcaaccagaatatcaactctcagggctacacctccgcaacgctggcgcgacgtagtgttgatatcttccaaaactacgttgcgattgccctgatgtttggcgtccaggctgtagacctgaggacttataaaaagactggccattacgatgcgcgtgcttgcctctctccggctaccgaacgcctgtattccgccgtgcgtcacgtagttggtcagaaacctacttcagatcgcccatacatctggaacgataacgagcagggtctggatgaacacatcgctcgcatctccgctgacattgccgctggcggagtaattgttcaagctgtacaggatatcctgccgtgcctgcactaaccggcttatcggtcagtttcacctgatttacgtaaaaacccgcttcggcgggtttttgcttttggaggggcagaaagatgaatgactgtccacgacgctatacccaaaagaaa

SEQ ID NO: 285 - DNA, 5122 bp, synthetic construct
  source 1..5122: mol_type = other DNA
aggctaggtggaggctcagtgatgataagtctgcgatggtggatgcatgtgtcatggtcatagctgtttcctgtgtgaaattgttatccgctcagagggcacaatcctattccgcgctatccgacaatctccaagacattaggtggagttcagttcggcgagcggaaatggcttacgaacggggcggagatttcctggaagatgccaggaagatacttaacagggaagtgagagggccgcggcaaagccgtttttccataggctccgcccccctgacaagcatcacgaaatctgacgctcaaatcagtggtggcgaaacccgacaggactataaagataccaggcgtttccccctggcggctccctcgtgcgctctcctgttcctgcctttcggtttaccggtgtcattccgctgttatggccgcgtttgtctcattccacgcctgacactcagttccgggtaggcagttcgctccaagctggactgtatgcacgaaccccccgttcagtccgaccgctgcgccttatccggtaactatcgtcttgagtccaacccggaaagacatgcaaaagcaccactggcagcagccactggtaattgatttagaggagttagtcttgaagtcatgcgccggttaaggctaaactgaaaggacaagttttggtgactgcgctcctccaagccagttacctcggttcaaagagttggtagctcagagaaccttcgaaaaaccgccctgcaaggcggttttttcgttttcagagcaagagattacgcgcagaccaaaacgatctcaagaagatcatcttattaagtctgacgctctattcaacaaagccgccgtccatgggtagggggcttcaaatcgtcctcgtgataccaattcggagcctgcttttttgtacaaacttgttgataatggcaattcaaggatcttcacctagatccttttaaattaaaaatgaagttttaaatcaatctaaagtatatatgagtaaacttggtctgacagttaccaatgcttaatcagtgaggcacctatctcagcgatctgtctatttcgttcatccatagttgcctgactccccgtcgtgtagataactacgatacgggagggcttaccatctggccccagtgctgcaatgataccgcgagagccacgctcaccggctccagatttatcagcaataaaccagccagccggaagggccgagcgcagaagtggtcctgcaactttatccgcctccatccagtctattaattgttgccgggaagctagagtaagtagttcgccagttaatagtttgcgcaacgttgttgccattgctacaggcatcgtggtgtcacgctcgtcgtttggtatggcttcattcagctccggttcccaacgatcaaggcgagttacatgatcccccatgttgtgcaaaaaagcggttagctccttcggtcctccgatcgttgtcagaagtaagttggccgcagtgttatcactcatggttatggcagcactgcataattctcttactgtcatgccatccgtaagatgcttttctgtgactggtgagtactcaaccaagtcattctgagaatagtgtatgcggcgaccgagttgctcttgcccggcgtcaatacgggataataccgcgccacatagcagaactttaaaagtgctcatcattggaaaacgttcttcggggcgaaaactctcaaggatcttaccgctgttgagatccagttcgatgtaacccactcgtgcacccaactgatcttcagcatcttttactttcaccagcgtttctgggtgagcaaaaacaggaaggcaaaatgccgcaaaaaagggaataagggcgacacggaaatgttgaatactcatactcttcctttttcaatattattgaagcatttatcagggttattgtctcatgagcggatacatatttgaatgtatttagaaaaataaacaaataggggttccgcgcacatttccccgaaaagtgccagatacctgaaacaaaacccatcgtacggccaaggaagtctccaataactgtgatccaccacaagcgccagggttttcccagtcacgacgttgtaaaacgacggccagtcatgcataatccgcacgcatctggaataaggaagtgccattccgcctgacctttgcctatgaggaccaaaacgaaaaaacaccctttcgggtgtcttttctggaatttggtaccgagaggctccatgattcagtatgacttgcctttggtcgaaaaaaaaagcccgcactgtcaggtgcgggcttttttctgtgtttccttattaggacccactttcacatttaagttgtttttctaatccgcatatgatcaattcaaggccgaataagaaggctggctctgcaccttggtgatcaaataattcgatagcttgtcgtaataatggcggcatactatcagtagtaggtgtttccctttcttctttagcgacttgatgctcttgatcttccaatacgcaacctaaagtaaaatgccccacagcgctgagtgcatataatgcattctctagtgaaaaaccttgttggcataaaaaggctaattgattttcgagagtttcatactgtttttctgtaggccgtgtacctaaatgtacttttgctccatcgcgatgacttagtaaagcacatctaaaacttttagcgttattacgtaaaaaatcttgccagctttccccttctaaagggcaaaagtgagtatggtgcctatctaacatctcaatggctaaggcgtcgagcaaagcccgcttattttttacatgccaatacaatgtaggctgctctacacctagcttctgggcgagtttacgggttgttaaaccttcgattccgacctcattaagcagctctaatgcgctgttaatcactttacttttatctaatctggacatattcaccaccctgaattgactctcttccgggcgctatcatgccataccgcgaaaggttttgcgccattcgatggcgcgccgccattgcttgtgcaatgtacatcagagattttgagacacaaccaattattgaaggcctccctaacggggggcctttttttgtttctggtcccccgcttaacgatcgttggctgttttcagcaggacgcactgacctccctatcagtgatagagattgacatccctatcagtgatagagatactgagcacagctgtcaccggatgtgctttccggtctgatgagtccgtgaggacgaaacagcctctacaaataattttgtttaaatcacacgggtaaggaggtatttaaatgaaaacactgtcccaagcacagtcgaagacgagtagccagcagttttctttcaccggtaattctagcgctaacgtgattatcggcaaccagaaactaactatcaacgacgtcgcccgcgttgctcggaacgggaccttagtaagcctgactaacaacactgatatacttcaaggcattcaggcgtcctgtgattatatcaataacgcagttgagtctggtgaaccaatttacggtgtgacctcaggcttcggcggtatggcgaacgttgctatcagccgtgaacaggcctccgaactgcaagagaatgtcgtatggtatcataaaactggtgctgggaacaaactccctttggcggacgtacgtgcagcaatgctgctgcgcgccaactcgcatatgcgtggcgcgtccggtatccgtctggagctgatcaaacgtatggaaatcttcttgaacgctggtgttactccgtacgtttatgaatttggatctatcggcgcttctggagatctggtcccgctgagctacattacgggttccctgattggccttgacccgagcttcaaggtggatttcaacggcaaagaaatggacgccccgaccgcgttacgccagttaaatctgtctcccctgacacttctgcctaaagaaggtattgctatgacgaatgggacctcagtcatgactggcatcgcagctaactgcgtatacgacacccagatcctgactgcgattgcaatgggtgttcacgctctggatatccaggccctgaacggcaccaaccagtctttccacccgtttatccataactctaagccgcacccaggtcagctgtgggcggctgatcagatgatatcattgctggctaactcgcaactggtacgggacgagctggacggcaaacatgattaccgcgaccacgagctgatccaggatcgttatagcctgcgttgccttccgcagtacctgggtccgattgtggacggtatctcacagatagcaaaacaaatcgaaattgaaattaactccgttactgataaccctctgattgacgtcgataaccaggcgtcgtaccacggcggaaatttcctgggtcagtatgttggcatgggtatggaccaccttcgctactatatcggcctgctggcgaaacacctggatgtgcagattgcgctgctagctagtcccgaatttagcaacggactgccgccatctttattgggcaaccgtgaacgtaaggttaacatgggtctgaaaggtttacaaatctgtggcaattccatcatgccgctgctgacgttctacggcaatagcatcgccgaccgctttccgacccatgcagagcaattcaaccagaatatcaactctcagggctacacctccgcaacgctggcgcgacgtagtgttgatatcttccaaaactacgttgcgattgccctgatgtttggcgtccaggctgtagacctgaggacttataaaaagactggccattacgatgcgcgtgcttgcctctctccggctaccgaacgcctgtattccgccgtgcgtcacgtagttggtcagaaacctacttcagatcgcccatacatctggaacgataacgagcagggtctggatgaacacatcgctcgcatctccgctgacattgccgctggcggagtaattgttcaagctgtacaggatatcctgccgtgcctgcactaaccggcttatcggtcagtttcacctgatttacgtaaaaacccgcttcggcgggtttttgcttttggaggggcagaaagatgaatgactgtccacgacgctatacccaaaagaaa

SEQ ID NO: 286 - DNA, 5122 bp, synthetic construct
  source 1..5122: mol_type = other DNA
aggctaggtggaggctcagtgatgataagtctgcgatggtggatgcatgtgtcatggtcatagctgtttcctgtgtgaaattgttatccgctcagagggcacaatcctattccgcgctatccgacaatctccaagacattaggtggagttcagttcggcgagcggaaatggcttacgaacggggcggagatttcctggaagatgccaggaagatacttaacagggaagtgagagggccgcggcaaagccgtttttccataggctccgcccccctgacaagcatcacgaaatctgacgctcaaatcagtggtggcgaaacccgacaggactataaagataccaggcgtttccccctggcggctccctcgtgcgctctcctgttcctgcctttcggtttaccggtgtcattccgctgttatggccgcgtttgtctcattccacgcctgacactcagttccgggtaggcagttcgctccaagctggactgtatgcacgaaccccccgttcagtccgaccgctgcgccttatccggtaactatcgtcttgagtccaacccggaaagacatgcaaaagcaccactggcagcagccactggtaattgatttagaggagttagtcttgaagtcatgcgccggttaaggctaaactgaaaggacaagttttggtgactgcgctcctccaagccagttacctcggttcaaagagttggtagctcagagaaccttcgaaaaaccgccctgcaaggcggttttttcgttttcagagcaagagattacgcgcagaccaaaacgatctcaagaagatcatcttattaagtctgacgctctattcaacaaagccgccgtccatgggtagggggcttcaaatcgtcctcgtgataccaattcggagcctgcttttttgtacaaacttgttgataatggcaattcaaggatcttcacctagatccttttaaattaaaaatgaagttttaaatcaatctaaagtatatatgagtaaacttggtctgacagttaccaatgcttaatcagtgaggcacctatctcagcgatctgtctatttcgttcatccatagttgcctgactccccgtcgtgtagataactacgatacgggagggcttaccatctggccccagtgctgcaatgataccgcgagagccacgctcaccggctccagatttatcagcaataaaccagccagccggaagggccgagcgcagaagtggtcctgcaactttatccgcctccatccagtctattaattgttgccgggaagctagagtaagtagttcgccagttaatagtttgcgcaacgttgttgccattgctacaggcatcgtggtgtcacgctcgtcgtttggtatggcttcattcagctccggttcccaacgatcaaggcgagttacatgatcccccatgttgtgcaaaaaagcggttagctccttcggtcctccgatcgttgtcagaagtaagttggccgcagtgttatcactcatggttatggcagcactgcataattctcttactgtcatgccatccgtaagatgcttttctgtgactggtgagtactcaaccaagtcattctgagaatagtgtatgcggcgaccgagttgctcttgcccggcgtcaatacgggataataccgcgccacatagcagaactttaaaagtgctcatcattggaaaacgttcttcggggcgaaaactctcaaggatcttaccgctgttgagatccagttcgatgtaacccactcgtgcacccaactgatcttcagcatcttttactttcaccagcgtttctgggtgagcaaaaacaggaaggcaaaatgccgcaaaaaagggaataagggcgacacggaaatgttgaatactcatactcttcctttttcaatattattgaagcatttatcagggttattgtctcatgagcggatacatatttgaatgtatttagaaaaataaacaaataggggttccgcgcacatttccccgaaaagtgccagatacctgaaacaaaacccatcgtacggccaaggaagtctccaataactgtgatccaccacaagcgccagggttttcccagtcacgacgttgtaaaacgacggccagtcatgcataatccgcacgcatctggaataaggaagtgccattccgcctgacctttgcctatgaggaccaaaacgaaaaaacaccctttcgggtgtcttttctggaatttggtaccgagaggctccatgattcagtatgacttgcctttggtcgaaaaaaaaagcccgcactgtcaggtgcgggcttttttctgtgtttccttattaggacccactttcacatttaagttgtttttctaatccgcatatgatcaattcaaggccgaataagaaggctggctctgcaccttggtgatcaaataattcgatagcttgtcgtaataatggcggcatactatcagtagtaggtgtttccctttcttctttagcgacttgatgctcttgatcttccaatacgcaacctaaagtaaaatgccccacagcgctgagtgcatataatgcattctctagtgaaaaaccttgttggcataaaaaggctaattgattttcgagagtttcatactgtttttctgtaggccgtgtacctaaatgtacttttgctccatcgcgatgacttagtaaagcacatctaaaacttttagcgttattacgtaaaaaatcttgccagctttccccttctaaagggcaaaagtgagtatggtgcctatctaacatctcaatggctaaggcgtcgagcaaagcccgcttattttttacatgccaatacaatgtaggctgctctacacctagcttctgggcgagtttacgggttgttaaaccttcgattccgacctcattaagcagctctaatgcgctgttaatcactttacttttatctaatctggacatattcaccaccctgaattgactctcttccgggcgctatcatgccataccgcgaaaggttttgcgccattcgatggcgcgccgccattgcttgtgcaatgtacatcagagattttgagacacaaccaattattgaaggcctccctaacggggggcctttttttgtttctggtcccccgcttaacgatcgttggctgttttcagcaggacgcactgacctccctatcagtgatagagattgacatccctatcagtgatagagatactgagcacagctgtcaccggatgtgctttccggtctgatgagtccgtgaggacgaaacagcctctacaaataattttgtttaaatcacacgggtaaggaggtatttaaatgaaaacactgtcccaagcacagtcgaagacgagtagccagcagttttctttcaccggtaattctagcgctaacgtgattatcggcaaccagaaactaactatcaacgacgtcgcccgcgttgctcggaacgggaccttagtaagcctgactaacaacactgatatacttcaaggcattcaggcgtcctgtgattatatcaataacgcagttgagtctggtgaaccaatttacggtgtgacctcaggcttcggcggtatggcgaacgttgctatcagccgtgaacaggcctccgaactgcaagagaatttggtatggtatctgaaaactggtgctgggaacaaactccctttggcggacgtacgtgcagcaatgctgctgcgcgccaactcgcatatgcgtggcgcgtccggtatccgtctggagctgatcaaacgtatggaaatcttcttgaacgctggtgttactccgtacgtttatgaatttggatctatcggcgcttctggagatctggtcccgctgagctacattacgggttccctgattggccttgacccgagcttcaaggtggatttcaacggcaaagaaatggacgccccgaccgcgttacgccagttaaatctgtctcccctgacacttctgcctaaagaaagtattgctatggtgaatgggacctcagtcatgactggcatcgcagctaactgcgtatacgacacccagatcctgactgcgattgcaatgggtgttcacgctctggatatccaggccctgaacggcaccaaccagtctttccacccgtttatccataactctaagccgcacccaggtcagctgtgggcggctgatcagatgatatcattgctggctaactcgcaactggtacgggacgagctggacggcaaacatgattaccgcgaccacgagctgatccaggatcgttatagcctgcgttgccttccgcagtacctgggtccgattgtggacggtatctcacagatagcaaaacaaatcgaaattgaaattaactccgttactgataaccctctgattgacgtcgataaccaggcgtcgtaccacggcggaaatttcctgggtcagtatgttggcatgggtatggaccaccttcgctactatatcggcctgctggcgaaacacctggatgtgcagattgcgctgctagctagtcccgaatttagcaacggactgccgccatctttattgggcaaccgtgaacgtaaggttaacatgggtctgaaaggtttacaaatctgtggcaattccatcatgccgctgctgacgttctacggcaatagcatcgccgaccgctttccgacccatgcagagcaattcaaccagaatatcaactctcagggctacacctccgcaacgctggcgcgacgtagtgttgatatcttccaaaactacgttgcgattgccctgatgtttggcgtccaggctgtagacctgaggacttataaaaagactggccattacgatgcgcgtgcttgcctctctccggctaccgaacgcctgtattccgccgtgcgtcacgtagttggtcagaaacctacttcagatcgcccatacatctggaacgataacgagcagggtctggatgaacacatcgctcgcatctccgctgacattgccgctggcggagtaattgttcaagctgtacaggatatcctgccgtgcctgcactaaccggcttatcggtcagtttcacctgatttacgtaaaaacccgcttcggcgggtttttgcttttggaggggcagaaagatgaatgactgtccacgacgctatacccaaaagaaa

SEQ ID NO: 287 - DNA, 5122 bp, synthetic construct
  source 1..5122: mol_type = other DNA
aggctaggtggaggctcagtgatgataagtctgcgatggtggatgcatgtgtcatggtcatagctgtttcctgtgtgaaattgttatccgctcagagggcacaatcctattccgcgctatccgacaatctccaagacattaggtggagttcagttcggcgagcggaaatggcttacgaacggggcggagatttcctggaagatgccaggaagatacttaacagggaagtgagagggccgcggcaaagccgtttttccataggctccgcccccctgacaagcatcacgaaatctgacgctcaaatcagtggtggcgaaacccgacaggactataaagataccaggcgtttccccctggcggctccctcgtgcgctctcctgttcctgcctttcggtttaccggtgtcattccgctgttatggccgcgtttgtctcattccacgcctgacactcagttccgggtaggcagttcgctccaagctggactgtatgcacgaaccccccgttcagtccgaccgctgcgccttatccggtaactatcgtcttgagtccaacccggaaagacatgcaaaagcaccactggcagcagccactggtaattgatttagaggagttagtcttgaagtcatgcgccggttaaggctaaactgaaaggacaagttttggtgactgcgctcctccaagccagttacctcggttcaaagagttggtagctcagagaaccttcgaaaaaccgccctgcaaggcggttttttcgttttcagagcaagagattacgcgcagaccaaaacgatctcaagaagatcatcttattaagtctgacgctctattcaacaaagccgccgtccatgggtagggggcttcaaatcgtcctcgtgataccaattcggagcctgcttttttgtacaaacttgttgataatggcaattcaaggatcttcacctagatccttttaaattaaaaatgaagttttaaatcaatctaaagtatatatgagtaaacttggtctgacagttaccaatgcttaatcagtgaggcacctatctcagcgatctgtctatttcgttcatccatagttgcctgactccccgtcgtgtagataactacgatacgggagggcttaccatctggccccagtgctgcaatgataccgcgagagccacgctcaccggctccagatttatcagcaataaaccagccagccggaagggccgagcgcagaagtggtcctgcaactttatccgcctccatccagtctattaattgttgccgggaagctagagtaagtagttcgccagttaatagtttgcgcaacgttgttgccattgctacaggcatcgtggtgtcacgctcgtcgtttggtatggcttcattcagctccggttcccaacgatcaaggcgagttacatgatcccccatgttgtgcaaaaaagcggttagctccttcggtcctccgatcgttgtcagaagtaagttggccgcagtgttatcactcatggttatggcagcactgcataattctcttactgtcatgccatccgtaagatgcttttctgtgactggtgagtactcaaccaagtcattctgagaatagtgtatgcggcgaccgagttgctcttgcccggcgtcaatacgggataataccgcgccacatagcagaactttaaaagtgctcatcattggaaaacgttcttcggggcgaaaactctcaaggatcttaccgctgttgagatccagttcgatgtaacccactcgtgcacccaactgatcttcagcatcttttactttcaccagcgtttctgggtgagcaaaaacaggaaggcaaaatgccgcaaaaaagggaataagggcgacacggaaatgttgaatactcatactcttcctttttcaatattattgaagcatttatcagggttattgtctcatgagcggatacatatttgaatgtatttagaaaaataaacaaataggggttccgcgcacatttccccgaaaagtgccagatacctgaaacaaaacccatcgtacggccaaggaagtctccaataactgtgatccaccacaagcgccagggttttcccagtcacgacgttgtaaaacgacggccagtcatgcataatccgcacgcatctggaataaggaagtgccattccgcctgacctttgcctatgaggaccaaaacgaaaaaacaccctttcgggtgtcttttctggaatttggtaccgagaggctccatgattcagtatgacttgcctttggtcgaaaaaaaaagcccgcactgtcaggtgcgggcttttttctgtgtttccttattaggacccactttcacatttaagttgtttttctaatccgcatatgatcaattcaaggccgaataagaaggctggctctgcaccttggtgatcaaataattcgatagcttgtcgtaataatggcggcatactatcagtagtaggtgtttccctttcttctttagcgacttgatgctcttgatcttccaatacgcaacctaaagtaaaatgccccacagcgctgagtgcatataatgcattctctagtgaaaaaccttgttggcataaaaaggctaattgattttcgagagtttcatactgtttttctgtaggccgtgtacctaaatgtacttttgctccatcgcgatgacttagtaaagcacatctaaaacttttagcgttattacgtaaaaaatcttgccagctttccccttctaaagggcaaaagtgagtatggtgcctatctaacatctcaatggctaaggcgtcgagcaaagcccgcttattttttacatgccaatacaatgtaggctgctctacacctagcttctgggcgagtttacgggttgttaaaccttcgattccgacctcattaagcagctctaatgcgctgttaatcactttacttttatctaatctggacatattcaccaccctgaattgactctcttccgggcgctatcatgccataccgcgaaaggttttgcgccattcgatggcgcgccgccattgcttgtgcaatgtacatcagagattttgagacacaaccaattattgaaggcctccctaacggggggcctttttttgtttctggtcccccgcttaacgatcgttggctgttttcagcaggacgcactgacctccctatcagtgatagagattgacatccctatcagtgatagagatactgagcacagctgtcaccggatgtgctttccggtctgatgagtccgtgaggacgaaacagcctctacaaataattttgtttaaatcacacgggtaaggaggtatttaaatgaaaacactgtcccaagcacagtcgaagacgagtagccagcagttttctttcaccggtaattctagcgctaacgtgattatcggcaaccagaaactaactatcaacgacgtcgcccgcgttgctcggaacgggaccttagtaagcctgactaacaacactgatatacttcaaggcattcaggcgtcctgtgattatatcaataacgcagttgagtctggtgaaccaatttacggtgtgacctcaggcttcggcggtatggcgaacgttgctatcagccgtgaacaggcctccgaactgcaaaccaatttggtatggtcgcataaaactggtgctgggaacaaactccctttggcggacgtacgtgcagcaatgctgctgcgcgccaactcgcatatgcgtggcgcgtccggtatccgtctggagctgatcaaacgtatggaaatcttcttgaacgctggtgttactccgtacgtttatgaatttggatctatcggcgcttctggagatctggtcccgctgagctacattacgggttccctgattggccttgacccgagcttcaaggtggatttcaacggcaaagaaatggacgccccgaccgcgttacgccagttaaatctgtctcccctgacacttctgcctaaagaatcaattgctatgttgaatgggacctcagtcatgactggcatcgcagctaactgcgtatacgacacccagatcctgactgcgattgcaatgggtgttcacgctctggatatccaggccctgaacggcaccaaccagtctttccacccgtttatccataactctaagccgcacccaggtcagctgtgggcggctgatcagatgatatcattgctggctaactcgcaactggtacgggacgagctggacggcaaacatgattaccgcgaccacgagctgatccaggatcgttatagcctgcgttgccttccgcagtacctgggtccgattgtggacggtatctcacagatagcaaaacaaatcgaaattgaaattaactccgttactgataaccctctgattgacgtcgataaccaggcgtcgtaccacggcggaaatttcctgggtcagtatgttggcatgggtatggaccaccttcgctactatatcggcctgctggcgaaacacctggatgtgcagattgcgctgctagctagtcccgaatttagcaacggactgccgccatctttattgggcaaccgtgaacgtaaggttaacatgggtctgaaaggtttacaaatctgtggcaattccatcatgccgctgctgacgttctacggcaatagcatcgccgaccgctttccgacccatgcagagcaattcaaccagaatatcaactctcagggctacacctccgcaacgctggcgcgacgtagtgttgatatcttccaaaactacgttgcgattgccctgatgtttggcgtccaggctgtagacctgaggacttataaaaagactggccattacgatgcgcgtgcttgcctctctccggctaccgaacgcctgtattccgccgtgcgtcacgtagttggtcagaaacctacttcagatcgcccatacatctggaacgataacgagcagggtctggatgaacacatcgctcgcatctccgctgacattgccgctggcggagtaattgttcaagctgtacaggatatcctgccgtgcctgcactaaccggcttatcggtcagtttcacctgatttacgtaaaaacccgcttcggcgggtttttgcttttggaggggcagaaagatgaatgactgtccacgacgctatacccaaaagaaa

SEQ ID NO: 288 - DNA, 5122 bp, synthetic construct
  source 1..5122: mol_type = other DNA
aggctaggtggaggctcagtgatgataagtctgcgatggtggatgcatgtgtcatggtcatagctgtttcctgtgtgaaattgttatccgctcagagggcacaatcctattccgcgctatccgacaatctccaagacattaggtggagttcagttcggcgagcggaaatggcttacgaacggggcggagatttcctggaagatgccaggaagatacttaacagggaagtgagagggccgcggcaaagccgtttttccataggctccgcccccctgacaagcatcacgaaatctgacgctcaaatcagtggtggcgaaacccgacaggactataaagataccaggcgtttccccctggcggctccctcgtgcgctctcctgttcctgcctttcggtttaccggtgtcattccgctgttatggccgcgtttgtctcattccacgcctgacactcagttccgggtaggcagttcgctccaagctggactgtatgcacgaaccccccgttcagtccgaccgctgcgccttatccggtaactatcgtcttgagtccaacccggaaagacatgcaaaagcaccactggcagcagccactggtaattgatttagaggagttagtcttgaagtcatgcgccggttaaggctaaactgaaaggacaagttttggtgactgcgctcctccaagccagttacctcggttcaaagagttggtagctcagagaaccttcgaaaaaccgccctgcaaggcggttttttcgttttcagagcaagagattacgcgcagaccaaaacgatctcaagaagatcatcttattaagtctgacgctctattcaacaaagccgccgtccatgggtagggggcttcaaatcgtcctcgtgataccaattcggagcctgcttttttgtacaaacttgttgataatggcaattcaaggatcttcacctagatccttttaaattaaaaatgaagttttaaatcaatctaaagtatatatgagtaaacttggtctgacagttaccaatgcttaatcagtgaggcacctatctcagcgatctgtctatttcgttcatccatagttgcctgactccccgtcgtgtagataactacgatacgggagggcttaccatctggccccagtgctgcaatgataccgcgagagccacgctcaccggctccagatttatcagcaataaaccagccagccggaagggccgagcgcagaagtggtcctgcaactttatccgcctccatccagtctattaattgttgccgggaagctagagtaagtagttcgccagttaatagtttgcgcaacgttgttgccattgctacaggcatcgtggtgtcacgctcgtcgtttggtatggcttcattcagctccggttcccaacgatcaaggcgagttacatgatcccccatgttgtgcaaaaaagcggttagctccttcggtcctccgatcgttgtcagaagtaagttggccgcagtgttatcactcatggttatggcagcactgcataattctcttactgtcatgccatccgtaagatgcttttctgtgactggtgagtactcaaccaagtcattctgagaatagtgtatgcggcgaccgagttgctcttgcccggcgtcaatacgggataataccgcgccacatagcagaactttaaaagtgctcatcattggaaaacgttcttcggggcgaaaactctcaaggatcttaccgctgttgagatccagttcgatgtaacccactcgtgcacccaactgatcttcagcatcttttactttcaccagcgtttctgggtgagcaaaaacaggaaggcaaaatgccgcaaaaaagggaataagggcgacacggaaatgttgaatactcatactcttcctttttcaatattattgaagcatttatcagggttattgtctcatgagcggatacatatttgaatgtatttagaaaaataaacaaataggggttccgcgcacatttccccgaaaagtgccagatacctgaaacaaaacccatcgtacggccaaggaagtctccaataactgtgatccaccacaagcgccagggttttcccagtcacgacgttgtaaaacgacggccagtcatgcataatccgcacgcatctggaataaggaagtgccattccgcctgacctttgcctatgaggaccaaaacgaaaaaacaccctttcgggtgtcttttctggaatttggtaccgagaggctccatgattcagtatgacttgcctttggtcgaaaaaaaaagcccgcactgtcaggtgcgggcttttttctgtgtttccttattaggacccactttcacatttaagttgtttttctaatccgcatatgatcaattcaaggccgaataagaaggctggctctgcaccttggtgatcaaataattcgatagcttgtcgtaataatggcggcatactatcagtagtaggtgtttccctttcttctttagcgacttgatgctcttgatcttccaatacgcaacctaaagtaaaatgccccacagcgctgagtgcatataatgcattctctagtgaaaaaccttgttggcataaaaaggctaattgattttcgagagtttcatactgtttttctgtaggccgtgtacctaaatgtacttttgctccatcgcgatgacttagtaaagcacatctaaaacttttagcgttattacgtaaaaaatcttgccagctttccccttctaaagggcaaaagtgagtatggtgcctatctaacatctcaatggctaaggcgtcgagcaaagcccgcttattttttacatgccaatacaatgtaggctgctctacacctagcttctgggcgagtttacgggttgttaaaccttcgattccgacctcattaagcagctctaatgcgctgttaatcactttacttttatctaatctggacatattcaccaccctgaattgactctcttccgggcgctatcatgccataccgcgaaaggttttgcgccattcgatggcgcgccgccattgcttgtgcaatgtacatcagagattttgagacacaaccaattattgaaggcctccctaacggggggcctttttttgtttctggtcccccgcttaacgatcgttggctgttttcagcaggacgcactgacctccctatcagtgatagagattgacatccctatcagtgatagagatactgagcacagctgtcaccggatgtgctttccggtctgatgagtccgtgaggacgaaacagcctctacaaataattttgtttaaatcacacgggtaaggaggtatttaaatgaaaacactgtcccaagcacagtcgaagacgagtagccagcagttttctttcaccggtaattctagcgctaacgtgattatcggcaaccagaaactaactatcaacgacgtcgcccgcgttgctcggaacgggaccttagtaagcctgactaacaacactgatatacttcaaggcattcaggcgtcctgtgattatatcaataacgcagttgagtctggtgaaccaatttacggtgtgacctcaggcttcggcggtatggcgaacgttgctatcagccgtgaacaggcctccgaactgcaagagaatgtcgtatggcacctgaaaactggtgctgggaacaaactccctttggcggacgtacgtgcagcaatgctgctgcgcgccaactcgcatatgcgtggcgcgtccggtatccgtctggagctgatcaaacgtatggaaatcttcttgaacgctggtgttactccgtacgtttatgaatttggatctatcggcgcttctggagatctggtcccgctgagctacattacgggttccctgattggccttgacccgagcttcaaggtggatttcaacggcaaagaaatggacgccccgaccgcgttacgccagttaaatctgtctcccctgacacttctgcctaaagaaggtattgctatggtgaatgggacctcagtcatgactggcatcgcagctaactgcgtatacgacacccagatcctgactgcgattgcaatgggtgttcacgctctggatatccaggccctgaacggcaccaaccagtctttccacccgtttatccataactctaagccgcacccaggtcagctgtgggcggctgatcagatgatatcattgctggctaactcgcaactggtacgggacgagctggacggcaaacatgattaccgcgaccacgagctgatccaggatcgttatagcctgcgttgccttccgcagtacctgggtccgattgtggacggtatctcacagatagcaaaacaaatcgaaattgaaattaactccgttactgataaccctctgattgacgtcgataaccaggcgtcgtaccacggcggaaatttcctgggtcagtatgttggcatgggtatggaccaccttcgctactatatcggcctgctggcgaaacacctggatgtgcagattgcgctgctagctagtcccgaatttagcaacggactgccgccatctttattgggcaaccgtgaacgtaaggttaacatgggtctgaaaggtttacaaatctgtggcaattccatcatgccgctgctgacgttctacggcaatagcatcgccgaccgctttccgacccatgcagagcaattcaaccagaatatcaactctcagggctacacctccgcaacgctggcgcgacgtagtgttgatatcttccaaaactacgttgcgattgccctgatgtttggcgtccaggctgtagacctgaggacttataaaaagactggccattacgatgcgcgtgcttgcctctctccggctaccgaacgcctgtattccgccgtgcgtcacgtagttggtcagaaacctacttcagatcgcccatacatctggaacgataacgagcagggtctggatgaacacatcgctcgcatctccgctgacattgccgctggcggagtaattgttcaagctgtacaggatatcctgccgtgcctgcactaaccggcttatcggtcagtttcacctgatttacgtaaaaacccgcttcggcgggtttttgcttttggaggggcagaaagatgaatgactgtccacgacgctatacccaaaagaaa

SEQ ID NO: 289 - DNA, 5122 bp, synthetic construct
  source 1..5122: mol_type = other DNA
aggctaggtggaggctcagtgatgataagtctgcgatggtggatgcatgtgtcatggtcatagctgtttcctgtgtgaaattgttatccgctcagagggcacaatcctattccgcgctatccgacaatctccaagacattaggtggagttcagttcggcgagcggaaatggcttacgaacggggcggagatttcctggaagatgccaggaagatacttaacagggaagtgagagggccgcggcaaagccgtttttccataggctccgcccccctgacaagcatcacgaaatctgacgctcaaatcagtggtggcgaaacccgacaggactataaagataccaggcgtttccccctggcggctccctcgtgcgctctcctgttcctgcctttcggtttaccggtgtcattccgctgttatggccgcgtttgtctcattccacgcctgacactcagttccgggtaggcagttcgctccaagctggactgtatgcacgaaccccccgttcagtccgaccgctgcgccttatccggtaactatcgtcttgagtccaacccggaaagacatgcaaaagcaccactggcagcagccactggtaattgatttagaggagttagtcttgaagtcatgcgccggttaaggctaaactgaaaggacaagttttggtgactgcgctcctccaagccagttacctcggttcaaagagttggtagctcagagaaccttcgaaaaaccgccctgcaaggcggttttttcgttttcagagcaagagattacgcgcagaccaaaacgatctcaagaagatcatcttattaagtctgacgctctattcaacaaagccgccgtccatgggtagggggcttcaaatcgtcctcgtgataccaattcggagcctgcttttttgtacaaacttgttgataatggcaattcaaggatcttcacctagatccttttaaattaaaaatgaagttttaaatcaatctaaagtatatatgagtaaacttggtctgacagttaccaatgcttaatcagtgaggcacctatctcagcgatctgtctatttcgttcatccatagttgcctgactccccgtcgtgtagataactacgatacgggagggcttaccatctggccccagtgctgcaatgataccgcgagagccacgctcaccggctccagatttatcagcaataaaccagccagccggaagggccgagcgcagaagtggtcctgcaactttatccgcctccatccagtctattaattgttgccgggaagctagagtaagtagttcgccagttaatagtttgcgcaacgttgttgccattgctacaggcatcgtggtgtcacgctcgtcgtttggtatggcttcattcagctccggttcccaacgatcaaggcgagttacatgatcccccatgttgtgcaaaaaagcggttagctccttcggtcctccgatcgttgtcagaagtaagttggccgcagtgttatcactcatggttatggcagcactgcataattctcttactgtcatgccatccgtaagatgcttttctgtgactggtgagtactcaaccaagtcattctgagaatagtgtatgcggcgaccgagttgctcttgcccggcgtcaatacgggataataccgcgccacatagcagaactttaaaagtgctcatcattggaaaacgttcttcggggcgaaaactctcaaggatcttaccgctgttgagatccagttcgatgtaacccactcgtgcacccaactgatcttcagcatcttttactttcaccagcgtttctgggtgagcaaaaacaggaaggcaaaatgccgcaaaaaagggaataagggcgacacggaaatgttgaatactcatactcttcctttttcaatattattgaagcatttatcagggttattgtctcatgagcggatacatatttgaatgtatttagaaaaataaacaaataggggttccgcgcacatttccccgaaaagtgccagatacctgaaacaaaacccatcgtacggccaaggaagtctccaataactgtgatccaccacaagcgccagggttttcccagtcacgacgttgtaaaacgacggccagtcatgcataatccgcacgcatctggaataaggaagtgccattccgcctgacctttgcctatgaggaccaaaacgaaaaaacaccctttcgggtgtcttttctggaatttggtaccgagaggctccatgattcagtatgacttgcctttggtcgaaaaaaaaagcccgcactgtcaggtgcgggcttttttctgtgtttccttattaggacccactttcacatttaagttgtttttctaatccgcatatgatcaattcaaggccgaataagaaggctggctctgcaccttggtgatcaaataattcgatagcttgtcgtaataatggcggcatactatcagtagtaggtgtttccctttcttctttagcgacttgatgctcttgatcttccaatacgcaacctaaagtaaaatgccccacagcgctgagtgcatataatgcattctctagtgaaaaaccttgttggcataaaaaggctaattgattttcgagagtttcatactgtttttctgtaggccgtgtacctaaatgtacttttgctccatcgcgatgacttagtaaagcacatctaaaacttttagcgttattacgtaaaaaatcttgccagctttccccttctaaagggcaaaagtgagtatggtgcctatctaacatctcaatggctaaggcgtcgagcaaagcccgcttattttttacatgccaatacaatgtaggctgctctacacctagcttctgggcgagtttacgggttgttaaaccttcgattccgacctcattaagcagctctaatgcgctgttaatcactttacttttatctaatctggacatattcaccaccctgaattgactctcttccgggcgctatcatgccataccgcgaaaggttttgcgccattcgatggcgcgccgccattgcttgtgcaatgtacatcagagattttgagacacaaccaattattgaaggcctccctaacggggggcctttttttgtttctggtcccccgcttaacgatcgttggctgttttcagcaggacgcactgacctccctatcagtgatagagattgacatccctatcagtgatagagatactgagcacagctgtcaccggatgtgctttccggtctgatgagtccgtgaggacgaaacagcctctacaaataattttgtttaaatcacacgggtaaggaggtatttaaatgaaaacactgtcccaagcacagtcgaagacgagtagccagcagttttctttcaccggtaattctagcgctaacgtgattatcggcaaccagaaactaactatcaacgacgtcgcccgcgttgctcggaacgggaccttagtaagcctgactaacaacactgatatacttcaaggcattcaggcgtcctgtgattatatcaataacgcagttgagtctggtgaaccaatttacggtgtgacctcaggcttcggcggtatggcgaacgttgctatcagccgtgaacaggcctccgaactgcaaaccaatgcggtatggtttgtcaaaactggtgctgggaacaaactccctttggcggacgtacgtgcagcaatgctgctgcgcgccaactcgcatatgcgtggcgcgtccggtatccgtctggagctgatcaaacgtatggaaatcttcttgaacgctggtgttactccgtacgtttatgaatttggatctatcggcgcttctggagatctggtcccgctgagctacattacgggttccctgattggccttgacccgagcttcaaggtggatttcaacggcaaagaaatggacgccccgaccgcgttacgccagttaaatctgtctcccctgacacttctgcctaaagaagccattgctatgctcaatgggacctcagtcatgactggcatcgcagctaactgcgtatacgacacccagatcctgactgcgattgcaatgggtgttcacgctctggatatccaggccctgaacggcaccaaccagtctttccacccgtttatccataactctaagccgcacccaggtcagctgtgggcggctgatcagatgatatcattgctggctaactcgcaactggtacgggacgagctggacggcaaacatgattaccgcgaccacgagctgatccaggatcgttatagcctgcgttgccttccgcagtacctgggtccgattgtggacggtatctcacagatagcaaaacaaatcgaaattgaaattaactccgttactgataaccctctgattgacgtcgataaccaggcgtcgtaccacggcggaaatttcctgggtcagtatgttggcatgggtatggaccaccttcgctactatatcggcctgctggcgaaacacctggatgtgcagattgcgctgctagctagtcccgaatttagcaacggactgccgccatctttattgggcaaccgtgaacgtaaggttaacatgggtctgaaaggtttacaaatctgtggcaattccatcatgccgctgctgacgttctacggcaatagcatcgccgaccgctttccgacccatgcagagcaattcaaccagaatatcaactctcagggctacacctccgcaacgctggcgcgacgtagtgttgatatcttccaaaactacgttgcgattgccctgatgtttggcgtccaggctgtagacctgaggacttataaaaagactggccattacgatgcgcgtgcttgcctctctccggctaccgaacgcctgtattccgccgtgcgtcacgtagttggtcagaaacctacttcagatcgcccatacatctggaacgataacgagcagggtctggatgaacacatcgctcgcatctccgctgacattgccgctggcggagtaattgttcaagctgtacaggatatcctgccgtgcctgcactaaccggcttatcggtcagtttcacctgatttacgtaaaaacccgcttcggcgggtttttgcttttggaggggcagaaagatgaatgactgtccacgacgctatacccaaaagaaa

SEQ ID NO: 290 - DNA, 5122 bp, synthetic construct
  source 1..5122: mol_type = other DNA
aggctaggtggaggctcagtgatgataagtctgcgatggtggatgcatgtgtcatggtcatagctgtttcctgtgtgaaattgttatccgctcagagggcacaatcctattccgcgctatccgacaatctccaagacattaggtggagttcagttcggcgagcggaaatggcttacgaacggggcggagatttcctggaagatgccaggaagatacttaacagggaagtgagagggccgcggcaaagccgtttttccataggctccgcccccctgacaagcatcacgaaatctgacgctcaaatcagtggtggcgaaacccgacaggactataaagataccaggcgtttccccctggcggctccctcgtgcgctctcctgttcctgcctttcggtttaccggtgtcattccgctgttatggccgcgtttgtctcattccacgcctgacactcagttccgggtaggcagttcgctccaagctggactgtatgcacgaaccccccgttcagtccgaccgctgcgccttatccggtaactatcgtcttgagtccaacccggaaagacatgcaaaagcaccactggcagcagccactggtaattgatttagaggagttagtcttgaagtcatgcgccggttaaggctaaactgaaaggacaagttttggtgactgcgctcctccaagccagttacctcggttcaaagagttggtagctcagagaaccttcgaaaaaccgccctgcaaggcggttttttcgttttcagagcaagagattacgcgcagaccaaaacgatctcaagaagatcatcttattaagtctgacgctctattcaacaaagccgccgtccatgggtagggggcttcaaatcgtcctcgtgataccaattcggagcctgcttttttgtacaaacttgttgataatggcaattcaaggatcttcacctagatccttttaaattaaaaatgaagttttaaatcaatctaaagtatatatgagtaaacttggtctgacagttaccaatgcttaatcagtgaggcacctatctcagcgatctgtctatttcgttcatccatagttgcctgactccccgtcgtgtagataactacgatacgggagggcttaccatctggccccagtgctgcaatgataccgcgagagccacgctcaccggctccagatttatcagcaataaaccagccagccggaagggccgagcgcagaagtggtcctgcaactttatccgcctccatccagtctattaattgttgccgggaagctagagtaagtagttcgccagttaatagtttgcgcaacgttgttgccattgctacaggcatcgtggtgtcacgctcgtcgtttggtatggcttcattcagctccggttcccaacgatcaaggcgagttacatgatcccccatgttgtgcaaaaaagcggttagctccttcggtcctccgatcgttgtcagaagtaagttggccgcagtgttatcactcatggttatggcagcactgcataattctcttactgtcatgccatccgtaagatgcttttctgtgactggtgagtactcaaccaagtcattctgagaatagtgtatgcggcgaccgagttgctcttgcccggcgtcaatacgggataataccgcgccacatagcagaactttaaaagtgctcatcattggaaaacgttcttcggggcgaaaactctcaaggatcttaccgctgttgagatccagttcgatgtaacccactcgtgcacccaactgatcttcagcatcttttactttcaccagcgtttctgggtgagcaaaaacaggaaggcaaaatgccgcaaaaaagggaataagggcgacacggaaatgttgaatactcatactcttcctttttcaatattattgaagcatttatcagggttattgtctcatgagcggatacatatttgaatgtatttagaaaaataaacaaataggggttccgcgcacatttccccgaaaagtgccagatacctgaaacaaaacccatcgtacggccaaggaagtctccaataactgtgatccaccacaagcgccagggttttcccagtcacgacgttgtaaaacgacggccagtcatgcataatccgcacgcatctggaataaggaagtgccattccgcctgacctttgcctatgaggaccaaaacgaaaaaacaccctttcgggtgtcttttctggaatttggtaccgagaggctccatgattcagtatgacttgcctttggtcgaaaaaaaaagcccgcactgtcaggtgcgggcttttttctgtgtttccttattaggacccactttcacatttaagttgtttttctaatccgcatatgatcaattcaaggccgaataagaaggctggctctgcaccttggtgatcaaataattcgatagcttgtcgtaataatggcggcatactatcagtagtaggtgtttccctttcttctttagcgacttgatgctcttgatcttccaatacgcaacctaaagtaaaatgccccacagcgctgagtgcatataatgcattctctagtgaaaaaccttgttggcataaaaaggctaattgattttcgagagtttcatactgtttttctgtaggccgtgtacctaaatgtacttttgctccatcgcgatgacttagtaaagcacatctaaaacttttagcgttattacgtaaaaaatcttgccagctttccccttctaaagggcaaaagtgagtatggtgcctatctaacatctcaatggctaaggcgtcgagcaaagcccgcttattttttacatgccaatacaatgtaggctgctctacacctagcttctgggcgagtttacgggttgttaaaccttcgattccgacctcattaagcagctctaatgcgctgttaatcactttacttttatctaatctggacatattcaccaccctgaattgactctcttccgggcgctatcatgccataccgcgaaaggttttgcgccattcgatggcgcgccgccattgcttgtgcaatgtacatcagagattttgagacacaaccaattattgaaggcctccctaacggggggcctttttttgtttctggtcccccgcttaacgatcgttggctgttttcagcaggacgcactgacctccctatcagtgatagagattgacatccctatcagtgatagagatactgagcacagctgtcaccggatgtgctttccggtctgatgagtccgtgaggacgaaacagcctctacaaataattttgtttaaatcacacgggtaaggaggtatttaaatgaaaacactgtcccaagcacagtcgaagacgagtagccagcagttttctttcaccggtaattctagcgctaacgtgattatcggcaaccagaaactaactatcaacgacgtcgcccgcgttgctcggaacgggaccttagtaagcctgactaacaacactgatatacttcaaggcattcaggcgtcctgtgattatatcaataacgcagttgagtctggtgaaccaatttacggtgtgacctcaggcttcggcggtatggcgaacgttgctatcagccgtgaacaggcctccgaactgcaagagaatattgtatggtttatgaaaactggtgctgggaacaaactccctttggcggacgtacgtgcagcaatgctgctgcgcgccaactcgcatatgcgtggcgcgtccggtatccgtctggagctgatcaaacgtatggaaatcttcttgaacgctggtgttactccgtacgtttatgaatttggatctatcggcgcttctggagatctggtcccgctgagctacattacgggttccctgattggccttgacccgagcttcaaggtggatttcaacggcaaagaaatggacgccccgaccgcgttacgccagttaaatctgtctcccctgacacttctgcctaaagaaggtctagctatgattaatgggacctcagtcatgactggcatcgcagctaactgcgtatacgacacccagatcctgactgcgattgcaatgggtgttcacgctctggatatccaggccctgaacggcaccaaccagtctttccacccgtttatccataactctaagccgcacccaggtcagctgtgggcggctgatcagatgatatcattgctggctaactcgcaactggtacgggacgagctggacggcaaacatgattaccgcgaccacgagctgatccaggatcgttatagcctgcgttgccttccgcagtacctgggtccgattgtggacggtatctcacagatagcaaaacaaatcgaaattgaaattaactccgttactgataaccctctgattgacgtcgataaccaggcgtcgtaccacggcggaaatttcctgggtcagtatgttggcatgggtatggaccaccttcgctactatatcggcctgctggcgaaacacctggatgtgcagattgcgctgctagctagtcccgaatttagcaacggactgccgccatctttattgggcaaccgtgaacgtaaggttaacatgggtctgaaaggtttacaaatctgtggcaattccatcatgccgctgctgacgttctacggcaatagcatcgccgaccgctttccgacccatgcagagcaattcaaccagaatatcaactctcagggctacacctccgcaacgctggcgcgacgtagtgttgatatcttccaaaactacgttgcgattgccctgatgtttggcgtccaggctgtagacctgaggacttataaaaagactggccattacgatgcgcgtgcttgcctctctccggctaccgaacgcctgtattccgccgtgcgtcacgtagttggtcagaaacctacttcagatcgcccatacatctggaacgataacgagcagggtctggatgaacacatcgctcgcatctccgctgacattgccgctggcggagtaattgttcaagctgtacaggatatcctgccgtgcctgcactaaccggcttatcggtcagtttcacctgatttacgtaaaaacccgcttcggcgggtttttgcttttggaggggcagaaagatgaatgactgtccacgacgctatacccaaaagaaa

SEQ ID NO: 291 - DNA, 5122 bp, synthetic construct
  source 1..5122: mol_type = other DNA
aggctaggtggaggctcagtgatgataagtctgcgatggtggatgcatgtgtcatggtcatagctgtttcctgtgtgaaattgttatccgctcagagggcacaatcctattccgcgctatccgacaatctccaagacattaggtggagttcagttcggcgagcggaaatggcttacgaacggggcggagatttcctggaagatgccaggaagatacttaacagggaagtgagagggccgcggcaaagccgtttttccataggctccgcccccctgacaagcatcacgaaatctgacgctcaaatcagtggtggcgaaacccgacaggactataaagataccaggcgtttccccctggcggctccctcgtgcgctctcctgttcctgcctttcggtttaccggtgtcattccgctgttatggccgcgtttgtctcattccacgcctgacactcagttccgggtaggcagttcgctccaagctggactgtatgcacgaaccccccgttcagtccgaccgctgcgccttatccggtaactatcgtcttgagtccaacccggaaagacatgcaaaagcaccactggcagcagccactggtaattgatttagaggagttagtcttgaagtcatgcgccggttaaggctaaactgaaaggacaagttttggtgactgcgctcctccaagccagttacctcggttcaaagagttggtagctcagagaaccttcgaaaaaccgccctgcaaggcggttttttcgttttcagagcaagagattacgcgcagaccaaaacgatctcaagaagatcatcttattaagtctgacgctctattcaacaaagccgccgtccatgggtagggggcttcaaatcgtcctcgtgataccaattcggagcctgcttttttgtacaaacttgttgataatggcaattcaaggatcttcacctagatccttttaaattaaaaatgaagttttaaatcaatctaaagtatatatgagtaaacttggtctgacagttaccaatgcttaatcagtgaggcacctatctcagcgatctgtctatttcgttcatccatagttgcctgactccccgtcgtgtagataactacgatacgggagggcttaccatctggccccagtgctgcaatgataccgcgagagccacgctcaccggctccagatttatcagcaataaaccagccagccggaagggccgagcgcagaagtggtcctgcaactttatccgcctccatccagtctattaattgttgccgggaagctagagtaagtagttcgccagttaatagtttgcgcaacgttgttgccattgctacaggcatcgtggtgtcacgctcgtcgtttggtatggcttcattcagctccggttcccaacgatcaaggcgagttacatgatcccccatgttgtgcaaaaaagcggttagctccttcggtcctccgatcgttgtcagaagtaagttggccgcagtgttatcactcatggttatggcagcactgcataattctcttactgtcatgccatccgtaagatgcttttctgtgactggtgagtactcaaccaagtcattctgagaatagtgtatgcggcgaccgagttgctcttgcccggcgtcaatacgggataataccgcgccacatagcagaactttaaaagtgctcatcattggaaaacgttcttcggggcgaaaactctcaaggatcttaccgctgttgagatccagttcgatgtaacccactcgtgcacccaactgatcttcagcatcttttactttcaccagcgtttctgggtgagcaaaaacaggaaggcaaaatgccgcaaaaaagggaataagggcgacacggaaatgttgaatactcatactcttcctttttcaatattattgaagcatttatcagggttattgtctcatgagcggatacatatttgaatgtatttagaaaaataaacaaataggggttccgcgcacatttccccgaaaagtgccagatacctgaaacaaaacccatcgtacggccaaggaagtctccaataactgtgatccaccacaagcgccagggttttcccagtcacgacgttgtaaaacgacggccagtcatgcataatccgcacgcatctggaataaggaagtgccattccgcctgacctttgcctatgaggaccaaaacgaaaaaacaccctttcgggtgtcttttctggaatttggtaccgagaggctccatgattcagtatgacttgcctttggtcgaaaaaaaaagcccgcactgtcaggtgcgggcttttttctgtgtttccttattaggacccactttcacatttaagttgtttttctaatccgcatatgatcaattcaaggccgaataagaaggctggctctgcaccttggtgatcaaataattcgatagcttgtcgtaataatggcggcatactatcagtagtaggtgtttccctttcttctttagcgacttgatgctcttgatcttccaatacgcaacctaaagtaaaatgccccacagcgctgagtgcatataatgcattctctagtgaaaaaccttgttggcataaaaaggctaattgattttcgagagtttcatactgtttttctgtaggccgtgtacctaaatgtacttttgctccatcgcgatgacttagtaaagcacatctaaaacttttagcgttattacgtaaaaaatcttgccagctttccccttctaaagggcaaaagtgagtatggtgcctatctaacatctcaatggctaaggcgtcgagcaaagcccgcttattttttacatgccaatacaatgtaggctgctctacacctagcttctgggcgagtttacgggttgttaaaccttcgattccgacctcattaagcagctctaatgcgctgttaatcactttacttttatctaatctggacatattcaccaccctgaattgactctcttccgggcgctatcatgccataccgcgaaaggttttgcgccattcgatggcgcgccgccattgcttgtgcaatgtacatcagagattttgagacacaaccaattattgaaggcctccctaacggggggcctttttttgtttctggtcccccgcttaacgatcgttggctgttttcagcaggacgcactgacctccctatcagtgatagagattgacatccctatcagtgatagagatactgagcacagctgtcaccggatgtgctttccggtctgatgagtccgtgaggacgaaacagcctctacaaataattttgtttaaatcacacgggtaaggaggtatttaaatgaaaacactgtcccaagcacagtcgaagacgagtagccagcagttttctttcaccggtaattctagcgctaacgtgattatcggcaaccagaaactaactatcaacgacgtcgcccgcgttgctcggaacgggaccttagtaagcctgactaacaacactgatatacttcaaggcattcaggcgtcctgtgattatatcaataacgcagttgagtctggtgaaccaatttacggtgtgacctcaggcttcggcggtatggcgaacgttgctatcagccgtgaacaggcctccgaactgcaacataatgtggtatggtttcacaaaactggtgctgggaacaaactccctttggcggacgtacgtgcagcaatgctgctgcgcgccaactcgcatatgcgtggcgcgtccggtatccgtctggagctgatcaaacgtatggaaatcttcttgaacgctggtgttactccgtacgtttatgaatttggatctatcggcgcttctggagatctggtcccgctgagctacattacgggttccctgattggccttgacccgagcttcaaggtggatttcaacggcaaagaaatggacgccccgaccgcgttacgccagttaaatctgtctcccctgacacttctgcctaaagaaggtattgctatgctcaatgggacctcagtcatgactggcatcgcagctaactgcgtatacgacacccagatcctgactgcgattgcaatgggtgttcacgctctggatatccaggccctgaacggcaccaaccagtctttccacccgtttatccataactctaagccgcacccaggtcagctgtgggcggctgatcagatgatatcattgctggctaactcgcaactggtacgggacgagctggacggcaaacatgattaccgcgaccacgagctgatccaggatcgttatagcctgcgttgccttccgcagtacctgggtccgattgtggacggtatctcacagatagcaaaacaaatcgaaattgaaattaactccgttactgataaccctctgattgacgtcgataaccaggcgtcgtaccacggcggaaatttcctgggtcagtatgttggcatgggtatggaccaccttcgctactatatcggcctgctggcgaaacacctggatgtgcagattgcgctgctagctagtcccgaatttagcaacggactgccgccatctttattgggcaaccgtgaacgtaaggttaacatgggtctgaaaggtttacaaatctgtggcaattccatcatgccgctgctgacgttctacggcaatagcatcgccgaccgctttccgacccatgcagagcaattcaaccagaatatcaactctcagggctacacctccgcaacgctggcgcgacgtagtgttgatatcttccaaaactacgttgcgattgccctgatgtttggcgtccaggctgtagacctgaggacttataaaaagactggccattacgatgcgcgtgcttgcctctctccggctaccgaacgcctgtattccgccgtgcgtcacgtagttggtcagaaacctacttcagatcgcccatacatctggaacgataacgagcagggtctggatgaacacatcgctcgcatctccgctgacattgccgctggcggagtaattgttcaagctgtacaggatatcctgccgtgcctgcactaaccggcttatcggtcagtttcacctgatttacgtaaaaacccgcttcggcgggtttttgcttttggaggggcagaaagatgaatgactgtccacgacgctatacccaaaagaaa

SEQ ID NO: 292 - DNA, 5122 bp, synthetic construct
  source 1..5122: mol_type = other DNA
aggctaggtggaggctcagtgatgataagtctgcgatggtggatgcatgtgtcatggtcatagctgtttcctgtgtgaaattgttatccgctcagagggcacaatcctattccgcgctatccgacaatctccaagacattaggtggagttcagttcggcgagcggaaatggcttacgaacggggcggagatttcctggaagatgccaggaagatacttaacagggaagtgagagggccgcggcaaagccgtttttccataggctccgcccccctgacaagcatcacgaaatctgacgctcaaatcagtggtggcgaaacccgacaggactataaagataccaggcgtttccccctggcggctccctcgtgcgctctcctgttcctgcctttcggtttaccggtgtcattccgctgttatggccgcgtttgtctcattccacgcctgacactcagttccgggtaggcagttcgctccaagctggactgtatgcacgaaccccccgttcagtccgaccgctgcgccttatccggtaactatcgtcttgagtccaacccggaaagacatgcaaaagcaccactggcagcagccactggtaattgatttagaggagttagtcttgaagtcatgcgccggttaaggctaaactgaaaggacaagttttggtgactgcgctcctccaagccagttacctcggttcaaagagttggtagctcagagaaccttcgaaaaaccgccctgcaaggcggttttttcgttttcagagcaagagattacgcgcagaccaaaacgatctcaagaagatcatcttattaagtctgacgctctattcaacaaagccgccgtccatgggtagggggcttcaaatcgtcctcgtgataccaattcggagcctgcttttttgtacaaacttgttgataatggcaattcaaggatcttcacctagatccttttaaattaaaaatgaagttttaaatcaatctaaagtatatatgagtaaacttggtctgacagttaccaatgcttaatcagtgaggcacctatctcagcgatctgtctatttcgttcatccatagttgcctgactccccgtcgtgtagataactacgatacgggagggcttaccatctggccccagtgctgcaatgataccgcgagagccacgctcaccggctccagatttatcagcaataaaccagccagccggaagggccgagcgcagaagtggtcctgcaactttatccgcctccatccagtctattaattgttgccgggaagctagagtaagtagttcgccagttaatagtttgcgcaacgttgttgccattgctacaggcatcgtggtgtcacgctcgtcgtttggtatggcttcattcagctccggttcccaacgatcaaggcgagttacatgatcccccatgttgtgcaaaaaagcggttagctccttcggtcctccgatcgttgtcagaagtaagttggccgcagtgttatcactcatggttatggcagcactgcataattctcttactgtcatgccatccgtaagatgcttttctgtgactggtgagtactcaaccaagtcattctgagaatagtgtatgcggcgaccgagttgctcttgcccggcgtcaatacgggataataccgcgccacatagcagaactttaaaagtgctcatcattggaaaacgttcttcggggcgaaaactctcaaggatcttaccgctgttgagatccagttcgatgtaacccactcgtgcacccaactgatcttcagcatcttttactttcaccagcgtttctgggtgagcaaaaacaggaaggcaaaatgccgcaaaaaagggaataagggcgacacggaaatgttgaatactcatactcttcctttttcaatattattgaagcatttatcagggttattgtctcatgagcggatacatatttgaatgtatttagaaaaataaacaaataggggttccgcgcacatttccccgaaaagtgccagatacctgaaacaaaacccatcgtacggccaaggaagtctccaataactgtgatccaccacaagcgccagggttttcccagtcacgacgttgtaaaacgacggccagtcatgcataatccgcacgcatctggaataaggaagtgccattccgcctgacctttgcctatgaggaccaaaacgaaaaaacaccctttcgggtgtcttttctggaatttggtaccgagaggctccatgattcagtatgacttgcctttggtcgaaaaaaaaagcccgcactgtcaggtgcgggcttttttctgtgtttccttattaggacccactttcacatttaagttgtttttctaatccgcatatgatcaattcaaggccgaataagaaggctggctctgcaccttggtgatcaaataattcgatagcttgtcgtaataatggcggcatactatcagtagtaggtgtttccctttcttctttagcgacttgatgctcttgatcttccaatacgcaacctaaagtaaaatgccccacagcgctgagtgcatataatgcattctctagtgaaaaaccttgttggcataaaaaggctaattgattttcgagagtttcatactgtttttctgtaggccgtgtacctaaatgtacttttgctccatcgcgatgacttagtaaagcacatctaaaacttttagcgttattacgtaaaaaatcttgccagctttccccttctaaagggcaaaagtgagtatggtgcctatctaacatctcaatggctaaggcgtcgagcaaagcccgcttattttttacatgccaatacaatgtaggctgctctacacctagcttctgggcgagtttacgggttgttaaaccttcgattccgacctcattaagcagctctaatgcgctgttaatcactttacttttatctaatctggacatattcaccaccctgaattgactctcttccgggcgctatcatgccataccgcgaaaggttttgcgccattcgatggcgcgccgccattgcttgtgcaatgtacatcagagattttgagacacaaccaattattgaaggcctccctaacggggggcctttttttgtttctggtcccccgcttaacgatcgttggctgttttcagcaggacgcactgacctccctatcagtgatagagattgacatccctatcagtgatagagatactgagcacagctgtcaccggatgtgctttccggtctgatgagtccgtgaggacgaaacagcctctacaaataattttgtttaaatcacacgggtaaggaggtatttaaatgaaaacactgtcccaagcacagtcgaagacgagtagccagcagttttctttcaccggtaattctagcgctaacgtgattatcggcaaccagaaactaactatcaacgacgtcgcccgcgttgctcggaacgggaccttagtaagcctgactaacaacactgatatacttcaaggcattcaggcgtcctgtgattatatcaataacgcagttgagtctggtgaaccaatttacggtgtgacctcaggcttcggcggtatggcgaacgttgctatcagccgtgaacaggcctccgaactgcaacacaatgtcgtatggtttcataaaactggtgctgggaacaaactccctttggcggacgtacgtgcagcaatgctgctgcgcgccaactcgcatatgcgtggcgcgtccggtatccgtctggagctgatcaaacgtatggaaatcttcttgaacgctggtgttactccgtacgtttatgaatttggatctatcggcgcttctggagatctggtcccgctgagctacattacgggttccctgattggccttgacccgagcttcaaggtggatttcaacggcaaagaaatggacgccccgaccgcgttacgccagttaaatctgtctcccctgacacttctgcctaaagaaggtctagctatgattaatgggacctcagtcatgactggcatcgcagctaactgcgtatacgacacccagatcctgactgcgattgcaatgggtgttcacgctctggatatccaggccctgaacggcaccaaccagtctttccacccgtttatccataactctaagccgcacccaggtcagctgtgggcggctgatcagatgatatcattgctggctaactcgcaactggtacgggacgagctggacggcaaacatgattaccgcgaccacgagctgatccaggatcgttatagcctgcgttgccttccgcagtacctgggtccgattgtggacggtatctcacagatagcaaaacaaatcgaaattgaaattaactccgttactgataaccctctgattgacgtcgataaccaggcgtcgtaccacggcggaaatttcctgggtcagtatgttggcatgggtatggaccaccttcgctactatatcggcctgctggcgaaacacctggatgtgcagattgcgctgctagctagtcccgaatttagcaacggactgccgccatctttattgggcaaccgtgaacgtaaggttaacatgggtctgaaaggtttacaaatctgtggcaattccatcatgccgctgctgacgttctacggcaatagcatcgccgaccgctttccgacccatgcagagcaattcaaccagaatatcaactctcagggctacacctccgcaacgctggcgcgacgtagtgttgatatcttccaaaactacgttgcgattgccctgatgtttggcgtccaggctgtagacctgaggacttataaaaagactggccattacgatgcgcgtgcttgcctctctccggctaccgaacgcctgtattccgccgtgcgtcacgtagttggtcagaaacctacttcagatcgcccatacatctggaacgataacgagcagggtctggatgaacacatcgctcgcatctccgctgacattgccgctggcggagtaattgttcaagctgtacaggatatcctgccgtgcctgcactaaccggcttatcggtcagtttcacctgatttacgtaaaaacccgcttcggcgggtttttgcttttggaggggcagaaagatgaatgactgtccacgacgctatacccaaaagaaa

SEQ ID NO: 293 - DNA, 5122 bp, synthetic construct
  source 1..5122: mol_type = other DNA
aggctaggtggaggctcagtgatgataagtctgcgatggtggatgcatgtgtcatggtcatagctgtttcctgtgtgaaattgttatccgctcagagggcacaatcctattccgcgctatccgacaatctccaagacattaggtggagttcagttcggcgagcggaaatggcttacgaacggggcggagatttcctggaagatgccaggaagatacttaacagggaagtgagagggccgcggcaaagccgtttttccataggctccgcccccctgacaagcatcacgaaatctgacgctcaaatcagtggtggcgaaacccgacaggactataaagataccaggcgtttccccctggcggctccctcgtgcgctctcctgttcctgcctttcggtttaccggtgtcattccgctgttatggccgcgtttgtctcattccacgcctgacactcagttccgggtaggcagttcgctccaagctggactgtatgcacgaaccccccgttcagtccgaccgctgcgccttatccggtaactatcgtcttgagtccaacccggaaagacatgcaaaagcaccactggcagcagccactggtaattgatttagaggagttagtcttgaagtcatgcgccggttaaggctaaactgaaaggacaagttttggtgactgcgctcctccaagccagttacctcggttcaaagagttggtagctcagagaaccttcgaaaaaccgccctgcaaggcggttttttcgttttcagagcaagagattacgcgcagaccaaaacgatctcaagaagatcatcttattaagtctgacgctctattcaacaaagccgccgtccatgggtagggggcttcaaatcgtcctcgtgataccaattcggagcctgcttttttgtacaaacttgttgataatggcaattcaaggatcttcacctagatccttttaaattaaaaatgaagttttaaatcaatctaaagtatatatgagtaaacttggtctgacagttaccaatgcttaatcagtgaggcacctatctcagcgatctgtctatttcgttcatccatagttgcctgactccccgtcgtgtagataactacgatacgggagggcttaccatctggccccagtgctgcaatgataccgcgagagccacgctcaccggctccagatttatcagcaataaaccagccagccggaagggccgagcgcagaagtggtcctgcaactttatccgcctccatccagtctattaattgttgccgggaagctagagtaagtagttcgccagttaatagtttgcgcaacgttgttgccattgctacaggcatcgtggtgtcacgctcgtcgtttggtatggcttcattcagctccggttcccaacgatcaaggcgagttacatgatcccccatgttgtgcaaaaaagcggttagctccttcggtcctccgatcgttgtcagaagtaagttggccgcagtgttatcactcatggttatggcagcactgcataattctcttactgtcatgccatccgtaagatgcttttctgtgactggtgagtactcaaccaagtcattctgagaatagtgtatgcggcgaccgagttgctcttgcccggcgtcaatacgggataataccgcgccacatagcagaactttaaaagtgctcatcattggaaaacgttcttcggggcgaaaactctcaaggatcttaccgctgttgagatccagttcgatgtaacccactcgtgcacccaactgatcttcagcatcttttactttcaccagcgtttctgggtgagcaaaaacaggaaggcaaaatgccgcaaaaaagggaataagggcgacacggaaatgttgaatactcatactcttcctttttcaatattattgaagcatttatcagggttattgtctcatgagcggatacatatttgaatgtatttagaaaaataaacaaataggggttccgcgcacatttccccgaaaagtgccagatacctgaaacaaaacccatcgtacggccaaggaagtctccaataactgtgatccaccacaagcgccagggttttcccagtcacgacgttgtaaaacgacggccagtcatgcataatccgcacgcatctggaataaggaagtgccattccgcctgacctttgcctatgaggaccaaaacgaaaaaacaccctttcgggtgtcttttctggaatttggtaccgagaggctccatgattcagtatgacttgcctttggtcgaaaaaaaaagcccgcactgtcaggtgcgggcttttttctgtgtttccttattaggacccactttcacatttaagttgtttttctaatccgcatatgatcaattcaaggccgaataagaaggctggctctgcaccttggtgatcaaataattcgatagcttgtcgtaataatggcggcatactatcagtagtaggtgtttccctttcttctttagcgacttgatgctcttgatcttccaatacgcaacctaaagtaaaatgccccacagcgctgagtgcatataatgcattctctagtgaaaaaccttgttggcataaaaaggctaattgattttcgagagtttcatactgtttttctgtaggccgtgtacctaaatgtacttttgctccatcgcgatgacttagtaaagcacatctaaaacttttagcgttattacgtaaaaaatcttgccagctttccccttctaaagggcaaaagtgagtatggtgcctatctaacatctcaatggctaaggcgtcgagcaaagcccgcttattttttacatgccaatacaatgtaggctgctctacacctagcttctgggcgagtttacgggttgttaaaccttcgattccgacctcattaagcagctctaatgcgctgttaatcactttacttttatctaatctggacatattcaccaccctgaattgactctcttccgggcgctatcatgccataccgcgaaaggttttgcgccattcgatggcgcgccgccattgcttgtgcaatgtacatcagagattttgagacacaaccaattattgaaggcctccctaacggggggcctttttttgtttctggtcccccgcttaacgatcgttggctgttttcagcaggacgcactgacctccctatcagtgatagagattgacatccctatcagtgatagagatactgagcacagctgtcaccggatgtgctttccggtctgatgagtccgtgaggacgaaacagcctctacaaataattttgtttaaatcacacgggtaaggaggtatttaaatgaaaacactgtcccaagcacagtcgaagacgagtagccagcagttttctttcaccggtaattctagcgctaacgtgattatcggcaaccagaaactaactatcaacgacgtcgcccgcgttgctcggaacgggaccttagtaagcctgactaacaacactgatatacttcaaggcattcaggcgtcctgtgattatatcaataacgcagttgagtctggtgaaccaatttacggtgtgacctcaggcttcggcggtatggcgaacgttgctatcagccgtgaacaggcctccgaactgcaagagaatttggtatggcatcacaaaactggtgctgggaacaaactccctttggcggacgtacgtgcagcaatgctgctgcgcgccaactcgcatatgcgtggcgcgtccggtatccgtctggagctgatcaaacgtatggaaatcttcttgaacgctggtgttactccgtacgtttatgaatttggatctatcggcgcttctggagatctggtcccgctgagctacattacgggttccctgattggccttgacccgagcttcaaggtggatttcaacggcaaagaaatggacgccccgaccgcgttacgccagttaaatctgtctcccctgacacttctgcctaaagaagcgattgctatgatgaatgggacctcagtcatgactggcatcgcagctaactgcgtatacgacacccagatcctgactgcgattgcaatgggtgttcacgctctggatatccaggccctgaacggcaccaaccagtctttccacccgtttatccataactctaagccgcacccaggtcagctgtgggcggctgatcagatgatatcattgctggctaactcgcaactggtacgggacgagctggacggcaaacatgattaccgcgaccacgagctgatccaggatcgttatagcctgcgttgccttccgcagtacctgggtccgattgtggacggtatctcacagatagcaaaacaaatcgaaattgaaattaactccgttactgataaccctctgattgacgtcgataaccaggcgtcgtaccacggcggaaatttcctgggtcagtatgttggcatgggtatggaccaccttcgctactatatcggcctgctggcgaaacacctggatgtgcagattgcgctgctagctagtcccgaatttagcaacggactgccgccatctttattgggcaaccgtgaacgtaaggttaacatgggtctgaaaggtttacaaatctgtggcaattccatcatgccgctgctgacgttctacggcaatagcatcgccgaccgctttccgacccatgcagagcaattcaaccagaatatcaactctcagggctacacctccgcaacgctggcgcgacgtagtgttgatatcttccaaaactacgttgcgattgccctgatgtttggcgtccaggctgtagacctgaggacttataaaaagactggccattacgatgcgcgtgcttgcctctctccggctaccgaacgcctgtattccgccgtgcgtcacgtagttggtcagaaacctacttcagatcgcccatacatctggaacgataacgagcagggtctggatgaacacatcgctcgcatctccgctgacattgccgctggcggagtaattgttcaagctgtacaggatatcctgccgtgcctgcactaaccggcttatcggtcagtttcacctgatttacgtaaaaacccgcttcggcgggtttttgcttttggaggggcagaaagatgaatgactgtccacgacgctatacccaaaagaaa

SEQ ID NO: 294 - DNA, 5122 bp, synthetic construct
  source 1..5122: mol_type = other DNA
aggctaggtggaggctcagtgatgataagtctgcgatggtggatgcatgtgtcatggtcatagctgtttcctgtgtgaaattgttatccgctcagagggcacaatcctattccgcgctatccgacaatctccaagacattaggtggagttcagttcggcgagcggaaatggcttacgaacggggcggagatttcctggaagatgccaggaagatacttaacagggaagtgagagggccgcggcaaagccgtttttccataggctccgcccccctgacaagcatcacgaaatctgacgctcaaatcagtggtggcgaaacccgacaggactataaagataccaggcgtttccccctggcggctccctcgtgcgctctcctgttcctgcctttcggtttaccggtgtcattccgctgttatggccgcgtttgtctcattccacgcctgacactcagttccgggtaggcagttcgctccaagctggactgtatgcacgaaccccccgttcagtccgaccgctgcgccttatccggtaactatcgtcttgagtccaacccggaaagacatgcaaaagcaccactggcagcagccactggtaattgatttagaggagttagtcttgaagtcatgcgccggttaaggctaaactgaaaggacaagttttggtgactgcgctcctccaagccagttacctcggttcaaagagttggtagctcagagaaccttcgaaaaaccgccctgcaaggcggttttttcgttttcagagcaagagattacgcgcagaccaaaacgatctcaagaagatcatcttattaagtctgacgctctattcaacaaagccgccgtccatgggtagggggcttcaaatcgtcctcgtgataccaattcggagcctgcttttttgtacaaacttgttgataatggcaattcaaggatcttcacctagatccttttaaattaaaaatgaagttttaaatcaatctaaagtatatatgagtaaacttggtctgacagttaccaatgcttaatcagtgaggcacctatctcagcgatctgtctatttcgttcatccatagttgcctgactccccgtcgtgtagataactacgatacgggagggcttaccatctggccccagtgctgcaatgataccgcgagagccacgctcaccggctccagatttatcagcaataaaccagccagccggaagggccgagcgcagaagtggtcctgcaactttatccgcctccatccagtctattaattgttgccgggaagctagagtaagtagttcgccagttaatagtttgcgcaacgttgttgccattgctacaggcatcgtggtgtcacgctcgtcgtttggtatggcttcattcagctccggttcccaacgatcaaggcgagttacatgatcccccatgttgtgcaaaaaagcggttagctccttcggtcctccgatcgttgtcagaagtaagttggccgcagtgttatcactcatggttatggcagcactgcataattctcttactgtcatgccatccgtaagatgcttttctgtgactggtgagtactcaaccaagtcattctgagaatagtgtatgcggcgaccgagttgctcttgcccggcgtcaatacgggataataccgcgccacatagcagaactttaaaagtgctcatcattggaaaacgttcttcggggcgaaaactctcaaggatcttaccgctgttgagatccagttcgatgtaacccactcgtgcacccaactgatcttcagcatcttttactttcaccagcgtttctgggtgagcaaaaacaggaaggcaaaatgccgcaaaaaagggaataagggcgacacggaaatgttgaatactcatactcttcctttttcaatattattgaagcatttatcagggttattgtctcatgagcggatacatatttgaatgtatttagaaaaataaacaaataggggttccgcgcacatttccccgaaaagtgccagatacctgaaacaaaacccatcgtacggccaaggaagtctccaataactgtgatccaccacaagcgccagggttttcccagtcacgacgttgtaaaacgacggccagtcatgcataatccgcacgcatctggaataaggaagtgccattccgcctgacctttgcctatgaggaccaaaacgaaaaaacaccctttcgggtgtcttttctggaatttggtaccgagaggctccatgattcagtatgacttgcctttggtcgaaaaaaaaagcccgcactgtcaggtgcgggcttttttctgtgtttccttattaggacccactttcacatttaagttgtttttctaatccgcatatgatcaattcaaggccgaataagaaggctggctctgcaccttggtgatcaaataattcgatagcttgtcgtaataatggcggcatactatcagtagtaggtgtttccctttcttctttagcgacttgatgctcttgatcttccaatacgcaacctaaagtaaaatgccccacagcgctgagtgcatataatgcattctctagtgaaaaaccttgttggcataaaaaggctaattgattttcgagagtttcatactgtttttctgtaggccgtgtacctaaatgtacttttgctccatcgcgatgacttagtaaagcacatctaaaacttttagcgttattacgtaaaaaatcttgccagctttccccttctaaagggcaaaagtgagtatggtgcctatctaacatctcaatggctaaggcgtcgagcaaagcccgcttattttttacatgccaatacaatgtaggctgctctacacctagcttctgggcgagtttacgggttgttaaaccttcgattccgacctcattaagcagctctaatgcgctgttaatcactttacttttatctaatctggacatattcaccaccctgaattgactctcttccgggcgctatcatgccataccgcgaaaggttttgcgccattcgatggcgcgccgccattgcttgtgcaatgtacatcagagattttgagacacaaccaattattgaaggcctccctaacggggggcctttttttgtttctggtcccccgcttaacgatcgttggctgttttcagcaggacgcactgacctccctatcagtgatagagattgacatccctatcagtgatagagatactgagcacagctgtcaccggatgtgctttccggtctgatgagtccgtgaggacgaaacagcctctacaaataattttgtttaaatcacacgggtaaggaggtatttaaatgaaaacactgtcccaagcacagtcgaagacgagtagccagcagttttctttcaccggtaattctagcgctaacgtgattatcggcaaccagaaactaactatcaacgacgtcgcccgcgttgctcggaacgggaccttagtaagcctgactaacaacactgatatacttcaaggcattcaggcgtcctgtgattatatcaataacgcagttgagtctggtgaaccaatttacggtgtgacctcaggcttcggcggtatggcgaacgttgctatcagccgtgaacaggcctccgaactgcaagagaatttggtatggtatctgaaaactggtgctgggaacaaactccctttggcggacgtacgtgcagcaatgctgctgcgcgccaactcgcatatgcgtggcgcgtccggtatccgtctggagctgatcaaacgtatggaaatcttcttgaacgctggtgttactccgtacgtttatgaatttggatctatcggcgcttctggagatctggtcccgctgagctacattacgggttccctgattggccttgacccgagcttcaaggtggatttcaacggcaaagaaatggacgccccgaccgcgttacgccagttaaatctgtctcccctgacacttctgcctaaagaatcgctagctatggtcaatgggacctcagtcatgactggcatcgcagctaactgcgtatacgacacccagatcctgactgcgattgcaatgggtgttcacgctctggatatccaggccctgaacggcaccaaccagtctttccacccgtttatccataactctaagccgcacccaggtcagctgtgggcggctgatcagatgatatcattgctggctaactcgcaactggtacgggacgagctggacggcaaacatgattaccgcgaccacgagctgatccaggatcgttatagcctgcgttgccttccgcagtacctgggtccgattgtggacggtatctcacagatagcaaaacaaatcgaaattgaaattaactccgttactgataaccctctgattgacgtcgataaccaggcgtcgtaccacggcggaaatttcctgggtcagtatgttggcatgggtatggaccaccttcgctactatatcggcctgctggcgaaacacctggatgtgcagattgcgctgctagctagtcccgaatttagcaacggactgccgccatctttattgggcaaccgtgaacgtaaggttaacatgggtctgaaaggtttacaaatctgtggcaattccatcatgccgctgctgacgttctacggcaatagcatcgccgaccgctttccgacccatgcagagcaattcaaccagaatatcaactctcagggctacacctccgcaacgctggcgcgacgtagtgttgatatcttccaaaactacgttgcgattgccctgatgtttggcgtccaggctgtagacctgaggacttataaaaagactggccattacgatgcgcgtgcttgcctctctccggctaccgaacgcctgtattccgccgtgcgtcacgtagttggtcagaaacctacttcagatcgcccatacatctggaacgataacgagcagggtctggatgaacacatcgctcgcatctccgctgacattgccgctggcggagtaattgttcaagctgtacaggatatcctgccgtgcctgcactaaccggcttatcggtcagtttcacctgatttacgtaaaaacccgcttcggcgggtttttgcttttggaggggcagaaagatgaatgactgtccacgacgctatacccaaaagaaa

SEQ ID NO: 295 - DNA, 5122 bp, synthetic construct
  source 1..5122: mol_type = other DNA
aggctaggtggaggctcagtgatgataagtctgcgatggtggatgcatgtgtcatggtcatagctgtttcctgtgtgaaattgttatccgctcagagggcacaatcctattccgcgctatccgacaatctccaagacattaggtggagttcagttcggcgagcggaaatggcttacgaacggggcggagatttcctggaagatgccaggaagatacttaacagggaagtgagagggccgcggcaaagccgtttttccataggctccgcccccctgacaagcatcacgaaatctgacgctcaaatcagtggtggcgaaacccgacaggactataaagataccaggcgtttccccctggcggctccctcgtgcgctctcctgttcctgcctttcggtttaccggtgtcattccgctgttatggccgcgtttgtctcattccacgcctgacactcagttccgggtaggcagttcgctccaagctggactgtatgcacgaaccccccgttcagtccgaccgctgcgccttatccggtaactatcgtcttgagtccaacccggaaagacatgcaaaagcaccactggcagcagccactggtaattgatttagaggagttagtcttgaagtcatgcgccggttaaggctaaactgaaaggacaagttttggtgactgcgctcctccaagccagttacctcggttcaaagagttggtagctcagagaaccttcgaaaaaccgccctgcaaggcggttttttcgttttcagagcaagagattacgcgcagaccaaaacgatctcaagaagatcatcttattaagtctgacgctctattcaacaaagccgccgtccatgggtagggggcttcaaatcgtcctcgtgataccaattcggagcctgcttttttgtacaaacttgttgataatggcaattcaaggatcttcacctagatccttttaaattaaaaatgaagttttaaatcaatctaaagtatatatgagtaaacttggtctgacagttaccaatgcttaatcagtgaggcacctatctcagcgatctgtctatttcgttcatccatagttgcctgactccccgtcgtgtagataactacgatacgggagggcttaccatctggccccagtgctgcaatgataccgcgagagccacgctcaccggctccagatttatcagcaataaaccagccagccggaagggccgagcgcagaagtggtcctgcaactttatccgcctccatccagtctattaattgttgccgggaagctagagtaagtagttcgccagttaatagtttgcgcaacgttgttgccattgctacaggcatcgtggtgtcacgctcgtcgtttggtatggcttcattcagctccggttcccaacgatcaaggcgagttacatgatcccccatgttgtgcaaaaaagcggttagctccttcggtcctccgatcgttgtcagaagtaagttggccgcagtgttatcactcatggttatggcagcactgcataattctcttactgtcatgccatccgtaagatgcttttctgtgactggtgagtactcaaccaagtcattctgagaatagtgtatgcggcgaccgagttgctcttgcccggcgtcaatacgggataataccgcgccacatagcagaactttaaaagtgctcatcattggaaaacgttcttcggggcgaaaactctcaaggatcttaccgctgttgagatccagttcgatgtaacccactcgtgcacccaactgatcttcagcatcttttactttcaccagcgtttctgggtgagcaaaaacaggaaggcaaaatgccgcaaaaaagggaataagggcgacacggaaatgttgaatactcatactcttcctttttcaatattattgaagcatttatcagggttattgtctcatgagcggatacatatttgaatgtatttagaaaaataaacaaataggggttccgcgcacatttccccgaaaagtgccagatacctgaaacaaaacccatcgtacggccaaggaagtctccaataactgtgatccaccacaagcgccagggttttcccagtcacgacgttgtaaaacgacggccagtcatgcataatccgcacgcatctggaataaggaagtgccattccgcctgacctttgcctatgaggaccaaaacgaaaaaacaccctttcgggtgtcttttctggaatttggtaccgagaggctccatgattcagtatgacttgcctttggtcgaaaaaaaaagcccgcactgtcaggtgcgggcttttttctgtgtttccttattaggacccactttcacatttaagttgtttttctaatccgcatatgatcaattcaaggccgaataagaaggctggctctgcaccttggtgatcaaataattcgatagcttgtcgtaataatggcggcatactatcagtagtaggtgtttccctttcttctttagcgacttgatgctcttgatcttccaatacgcaacctaaagtaaaatgccccacagcgctgagtgcatataatgcattctctagtgaaaaaccttgttggcataaaaaggctaattgattttcgagagtttcatactgtttttctgtaggccgtgtacctaaatgtacttttgctccatcgcgatgacttagtaaagcacatctaaaacttttagcgttattacgtaaaaaatcttgccagctttccccttctaaagggcaaaagtgagtatggtgcctatctaacatctcaatggctaaggcgtcgagcaaagcccgcttattttttacatgccaatacaatgtaggctgctctacacctagcttctgggcgagtttacgggttgttaaaccttcgattccgacctcattaagcagctctaatgcgctgttaatcactttacttttatctaatctggacatattcaccaccctgaattgactctcttccgggcgctatcatgccataccgcgaaaggttttgcgccattcgatggcgcgccgccattgcttgtgcaatgtacatcagagattttgagacacaaccaattattgaaggcctccctaacggggggcctttttttgtttctggtcccccgcttaacgatcgttggctgttttcagcaggacgcactgacctccctatcagtgatagagattgacatccctatcagtgatagagatactgagcacagctgtcaccggatgtgctttccggtctgatgagtccgtgaggacgaaacagcctctacaaataattttgtttaaatcacacgggtaaggaggtatttaaatgaaaacactgtcccaagcacagtcgaagacgagtagccagcagttttctttcaccggtaattctagcgctaacgtgattatcggcaaccagaaactaactatcaacgacgtcgcccgcgttgctcggaacgggaccttagtaagcctgactaacaacactgatatacttcaaggcattcaggcgtcctgtgattatatcaataacgcagttgagtctggtgaaccaatttacggtgtgacctcaggcttcggcggtatggcgaacgttgctatcagccgtgaacaggcctccgaactgcaaagtaatttggtatggtttatgaaaactggtgctgggaacaaactccctttggcggacgtacgtgcagcaatgctgctgcgcgccaactcgcatatgcgtggcgcgtccggtatccgtctggagctgatcaaacgtatggaaatcttcttgaacgctggtgttactccgtacgtttatgaatttggatctatcggcgcttctggagatctggtcccgctgagctacattacgggttccctgattggccttgacccgagcttcaaggtggatttcaacggcaaagaaatggacgccccgaccgcgttacgccagttaaatctgtctcccctgacacttctgcctaaagaaggtattgctatgattaatgggacctcagtcatgactggcatcgcagctaactgcgtatacgacacccagatcctgactgcgattgcaatgggtgttcacgctctggatatccaggccctgaacggcaccaaccagtctttccacccgtttatccataactctaagccgcacccaggtcagctgtgggcggctgatcagatgatatcattgctggctaactcgcaactggtacgggacgagctggacggcaaacatgattaccgcgaccacgagctgatccaggatcgttatagcctgcgttgccttccgcagtacctgggtccgattgtggacggtatctcacagatagcaaaacaaatcgaaattgaaattaactccgttactgataaccctctgattgacgtcgataaccaggcgtcgtaccacggcggaaatttcctgggtcagtatgttggcatgggtatggaccaccttcgctactatatcggcctgctggcgaaacacctggatgtgcagattgcgctgctagctagtcccgaatttagcaacggactgccgccatctttattgggcaaccgtgaacgtaaggttaacatgggtctgaaaggtttacaaatctgtggcaattccatcatgccgctgctgacgttctacggcaatagcatcgccgaccgctttccgacccatgcagagcaattcaaccagaatatcaactctcagggctacacctccgcaacgctggcgcgacgtagtgttgatatcttccaaaactacgttgcgattgccctgatgtttggcgtccaggctgtagacctgaggacttataaaaagactggccattacgatgcgcgtgcttgcctctctccggctaccgaacgcctgtattccgccgtgcgtcacgtagttggtcagaaacctacttcagatcgcccatacatctggaacgataacgagcagggtctggatgaacacatcgctcgcatctccgctgacattgccgctggcggagtaattgttcaagctgtacaggatatcctgccgtgcctgcactaaccggcttatcggtcagtttcacctgatttacgtaaaaacccgcttcggcgggtttttgcttttggaggggcagaaagatgaatgactgtccacgacgctatacccaaaagaaa

SEQ ID NO: 296 - DNA, 5122 bp, synthetic construct
  source 1..5122: mol_type = other DNA
aggctaggtggaggctcagtgatgataagtctgcgatggtggatgcatgtgtcatggtcatagctgtttcctgtgtgaaattgttatccgctcagagggcacaatcctattccgcgctatccgacaatctccaagacattaggtggagttcagttcggcgagcggaaatggcttacgaacggggcggagatttcctggaagatgccaggaagatacttaacagggaagtgagagggccgcggcaaagccgtttttccataggctccgcccccctgacaagcatcacgaaatctgacgctcaaatcagtggtggcgaaacccgacaggactataaagataccaggcgtttccccctggcggctccctcgtgcgctctcctgttcctgcctttcggtttaccggtgtcattccgctgttatggccgcgtttgtctcattccacgcctgacactcagttccgggtaggcagttcgctccaagctggactgtatgcacgaaccccccgttcagtccgaccgctgcgccttatccggtaactatcgtcttgagtccaacccggaaagacatgcaaaagcaccactggcagcagccactggtaattgatttagaggagttagtcttgaagtcatgcgccggttaaggctaaactgaaaggacaagttttggtgactgcgctcctccaagccagttacctcggttcaaagagttggtagctcagagaaccttcgaaaaaccgccctgcaaggcggttttttcgttttcagagcaagagattacgcgcagaccaaaacgatctcaagaagatcatcttattaagtctgacgctctattcaacaaagccgccgtccatgggtagggggcttcaaatcgtcctcgtgataccaattcggagcctgcttttttgtacaaacttgttgataatggcaattcaaggatcttcacctagatccttttaaattaaaaatgaagttttaaatcaatctaaagtatatatgagtaaacttggtctgacagttaccaatgcttaatcagtgaggcacctatctcagcgatctgtctatttcgttcatccatagttgcctgactccccgtcgtgtagataactacgatacgggagggcttaccatctggccccagtgctgcaatgataccgcgagagccacgctcaccggctccagatttatcagcaataaaccagccagccggaagggccgagcgcagaagtggtcctgcaactttatccgcctccatccagtctattaattgttgccgggaagctagagtaagtagttcgccagttaatagtttgcgcaacgttgttgccattgctacaggcatcgtggtgtcacgctcgtcgtttggtatggcttcattcagctccggttcccaacgatcaaggcgagttacatgatcccccatgttgtgcaaaaaagcggttagctccttcggtcctccgatcgttgtcagaagtaagttggccgcagtgttatcactcatggttatggcagcactgcataattctcttactgtcatgccatccgtaagatgcttttctgtgactggtgagtactcaaccaagtcattctgagaatagtgtatgcggcgaccgagttgctcttgcccggcgtcaatacgggataataccgcgccacatagcagaactttaaaagtgctcatcattggaaaacgttcttcggggcgaaaactctcaaggatcttaccgctgttgagatccagttcgatgtaacccactcgtgcacccaactgatcttcagcatcttttactttcaccagcgtttctgggtgagcaaaaacaggaaggcaaaatgccgcaaaaaagggaataagggcgacacggaaatgttgaatactcatactcttcctttttcaatattattgaagcatttatcagggttattgtctcatgagcggatacatatttgaatgtatttagaaaaataaacaaataggggttccgcgcacatttccccgaaaagtgccagatacctgaaacaaaacccatcgtacggccaaggaagtctccaataactgtgatccaccacaagcgccagggttttcccagtcacgacgttgtaaaacgacggccagtcatgcataatccgcacgcatctggaataaggaagtgccattccgcctgacctttgcctatgaggaccaaaacgaaaaaacaccctttcgggtgtcttttctggaatttggtaccgagaggctccatgattcagtatgacttgcctttggtcgaaaaaaaaagcccgcactgtcaggtgcgggcttttttctgtgtttccttattaggacccactttcacatttaagttgtttttctaatccgcatatgatcaattcaaggccgaataagaaggctggctctgcaccttggtgatcaaataattcgatagcttgtcgtaataatggcggcatactatcagtagtaggtgtttccctttcttctttagcgacttgatgctcttgatcttccaatacgcaacctaaagtaaaatgccccacagcgctgagtgcatataatgcattctctagtgaaaaaccttgttggcataaaaaggctaattgattttcgagagtttcatactgtttttctgtaggccgtgtacctaaatgtacttttgctccatcgcgatgacttagtaaagcacatctaaaacttttagcgttattacgtaaaaaatcttgccagctttccccttctaaagggcaaaagtgagtatggtgcctatctaacatctcaatggctaaggcgtcgagcaaagcccgcttattttttacatgccaatacaatgtaggctgctctacacctagcttctgggcgagtttacgggttgttaaaccttcgattccgacctcattaagcagctctaatgcgctgttaatcactttacttttatctaatctggacatattcaccaccctgaattgactctcttccgggcgctatcatgccataccgcgaaaggttttgcgccattcgatggcgcgccgccattgcttgtgcaatgtacatcagagattttgagacacaaccaattattgaaggcctccctaacggggggcctttttttgtttctggtcccccgcttaacgatcgttggctgttttcagcaggacgcactgacctccctatcagtgatagagattgacatccctatcagtgatagagatactgagcacagctgtcaccggatgtgctttccggtctgatgagtccgtgaggacgaaacagcctctacaaataattttgtttaaatcacacgggtaaggaggtatttaaatgaaaacactgtcccaagcacagtcgaagacgagtagccagcagttttctttcaccggtaattctagcgctaacgtgattatcggcaaccagaaactaactatcaacgacgtcgcccgcgttgctcggaacgggaccttagtaagcctgactaacaacactgatatacttcaaggcattcaggcgtcctgtgattatatcaataacgcagttgagtctggtgaaccaatttacggtgtgacctcaggcttcggcggtatggcgaacgttgctatcagccgtgaacaggcctccgaactgcaaagtaatttggtatggcacctgaaaactggtgctgggaacaaactccctttggcggacgtacgtgcagcaatgctgctgcgcgccaactcgcatatgcgtggcgcgtccggtatccgtctggagctgatcaaacgtatggaaatcttcttgaacgctggtgttactccgtacgtttatgaatttggatctatcggcgcttctggagatctggtcccgctgagctacattacgggttccctgattggccttgacccgagcttcaaggtggatttcaacggcaaagaaatggacgccccgaccgcgttacgccagttaaatctgtctcccctgacacttctgcctaaagaagcactagctatgacgaatgggacctcagtcatgactggcatcgcagctaactgcgtatacgacacccagatcctgactgcgattgcaatgggtgttcacgctctggatatccaggccctgaacggcaccaaccagtctttccacccgtttatccataactctaagccgcacccaggtcagctgtgggcggctgatcagatgatatcattgctggctaactcgcaactggtacgggacgagctggacggcaaacatgattaccgcgaccacgagctgatccaggatcgttatagcctgcgttgccttccgcagtacctgggtccgattgtggacggtatctcacagatagcaaaacaaatcgaaattgaaattaactccgttactgataaccctctgattgacgtcgataaccaggcgtcgtaccacggcggaaatttcctgggtcagtatgttggcatgggtatggaccaccttcgctactatatcggcctgctggcgaaacacctggatgtgcagattgcgctgctagctagtcccgaatttagcaacggactgccgccatctttattgggcaaccgtgaacgtaaggttaacatgggtctgaaaggtttacaaatctgtggcaattccatcatgccgctgctgacgttctacggcaatagcatcgccgaccgctttccgacccatgcagagcaattcaaccagaatatcaactctcagggctacacctccgcaacgctggcgcgacgtagtgttgatatcttccaaaactacgttgcgattgccctgatgtttggcgtccaggctgtagacctgaggacttataaaaagactggccattacgatgcgcgtgcttgcctctctccggctaccgaacgcctgtattccgccgtgcgtcacgtagttggtcagaaacctacttcagatcgcccatacatctggaacgataacgagcagggtctggatgaacacatcgctcgcatctccgctgacattgccgctggcggagtaattgttcaagctgtacaggatatcctgccgtgcctgcactaaccggcttatcggtcagtttcacctgatttacgtaaaaacccgcttcggcgggtttttgcttttggaggggcagaaagatgaatgactgtccacgacgctatacccaaaagaaa

SEQ ID NO: 297 - DNA, 5122 bp, synthetic construct
  source 1..5122: mol_type = other DNA
aggctaggtggaggctcagtgatgataagtctgcgatggtggatgcatgtgtcatggtcatagctgtttcctgtgtgaaattgttatccgctcagagggcacaatcctattccgcgctatccgacaatctccaagacattaggtggagttcagttcggcgagcggaaatggcttacgaacggggcggagatttcctggaagatgccaggaagatacttaacagggaagtgagagggccgcggcaaagccgtttttccataggctccgcccccctgacaagcatcacgaaatctgacgctcaaatcagtggtggcgaaacccgacaggactataaagataccaggcgtttccccctggcggctccctcgtgcgctctcctgttcctgcctttcggtttaccggtgtcattccgctgttatggccgcgtttgtctcattccacgcctgacactcagttccgggtaggcagttcgctccaagctggactgtatgcacgaaccccccgttcagtccgaccgctgcgccttatccggtaactatcgtcttgagtccaacccggaaagacatgcaaaagcaccactggcagcagccactggtaattgatttagaggagttagtcttgaagtcatgcgccggttaaggctaaactgaaaggacaagttttggtgactgcgctcctccaagccagttacctcggttcaaagagttggtagctcagagaaccttcgaaaaaccgccctgcaaggcggttttttcgttttcagagcaagagattacgcgcagaccaaaacgatctcaagaagatcatcttattaagtctgacgctctattcaacaaagccgccgtccatgggtagggggcttcaaatcgtcctcgtgataccaattcggagcctgcttttttgtacaaacttgttgataatggcaattcaaggatcttcacctagatccttttaaattaaaaatgaagttttaaatcaatctaaagtatatatgagtaaacttggtctgacagttaccaatgcttaatcagtgaggcacctatctcagcgatctgtctatttcgttcatccatagttgcctgactccccgtcgtgtagataactacgatacgggagggcttaccatctggccccagtgctgcaatgataccgcgagagccacgctcaccggctccagatttatcagcaataaaccagccagccggaagggccgagcgcagaagtggtcctgcaactttatccgcctccatccagtctattaattgttgccgggaagctagagtaagtagttcgccagttaatagtttgcgcaacgttgttgccattgctacaggcatcgtggtgtcacgctcgtcgtttggtatggcttcattcagctccggttcccaacgatcaaggcgagttacatgatcccccatgttgtgcaaaaaagcggttagctccttcggtcctccgatcgttgtcagaagtaagttggccgcagtgttatcactcatggttatggcagcactgcataattctcttactgtcatgccatccgtaagatgcttttctgtgactggtgagtactcaaccaagtcattctgagaatagtgtatgcggcgaccgagttgctcttgcccggcgtcaatacgggataataccgcgccacatagcagaactttaaaagtgctcatcattggaaaacgttcttcggggcgaaaactctcaaggatcttaccgctgttgagatccagttcgatgtaacccactcgtgcacccaactgatcttcagcatcttttactttcaccagcgtttctgggtgagcaaaaacaggaaggcaaaatgccgcaaaaaagggaataagggcgacacggaaatgttgaatactcatactcttcctttttcaatattattgaagcatttatcagggttattgtctcatgagcggatacatatttgaatgtatttagaaaaataaacaaataggggttccgcgcacatttccccgaaaagtgccagatacctgaaacaaaacccatcgtacggccaaggaagtctccaataactgtgatccaccacaagcgccagggttttcccagtcacgacgttgtaaaacgacggccagtcatgcataatccgcacgcatctggaataaggaagtgccattccgcctgacctttgcctatgaggaccaaaacgaaaaaacaccctttcgggtgtcttttctggaatttggtaccgagaggctccatgattcagtatgacttgcctttggtcgaaaaaaaaagcccgcactgtcaggtgcgggcttttttctgtgtttccttattaggacccactttcacatttaagttgtttttctaatccgcatatgatcaattcaaggccgaataagaaggctggctctgcaccttggtgatcaaataattcgatagcttgtcgtaataatggcggcatactatcagtagtaggtgtttccctttcttctttagcgacttgatgctcttgatcttccaatacgcaacctaaagtaaaatgccccacagcgctgagtgcatataatgcattctctagtgaaaaaccttgttggcataaaaaggctaattgattttcgagagtttcatactgtttttctgtaggccgtgtacctaaatgtacttttgctccatcgcgatgacttagtaaagcacatctaaaacttttagcgttattacgtaaaaaatcttgccagctttccccttctaaagggcaaaagtgagtatggtgcctatctaacatctcaatggctaaggcgtcgagcaaagcccgcttattttttacatgccaatacaatgtaggctgctctacacctagcttctgggcgagtttacgggttgttaaaccttcgattccgacctcattaagcagctctaatgcgctgttaatcactttacttttatctaatctggacatattcaccaccctgaattgactctcttccgggcgctatcatgccataccgcgaaaggttttgcgccattcgatggcgcgccgccattgcttgtgcaatgtacatcagagattttgagacacaaccaattattgaaggcctccctaacggggggcctttttttgtttctggtcccccgcttaacgatcgttggctgttttcagcaggacgcactgacctccctatcagtgatagagattgacatccctatcagtgatagagatactgagcacagctgtcaccggatgtgctttccggtctgatgagtccgtgaggacgaaacagcctctacaaataattttgtttaaatcacacgggtaaggaggtatttaaatgaaaacactgtcccaagcacagtcgaagacgagtagccagcagttttctttcaccggtaattctagcgctaacgtgattatcggcaaccagaaactaactatcaacgacgtcgcccgcgttgctcggaacgggaccttagtaagcctgactaacaacactgatatacttcaaggcattcaggcgtcctgtgattatatcaataacgcagttgagtctggtgaaccaatttacggtgtgacctcaggcttcggcggtatggcgaacgttgctatcagccgtgaacaggcctccgaactgcaaaccaatgcggtatggcatctgaaaactggtgctgggaacaaactccctttggcggacgtacgtgcagcaatgctgctgcgcgccaactcgcatatgcgtggcgcgtccggtatccgtctggagctgatcaaacgtatggaaatcttcttgaacgctggtgttactccgtacgtttatgaatttggatctatcggcgcttctggagatctggtcccgctgagctacattacgggttccctgattggccttgacccgagcttcaaggtggatttcaacggcaaagaaatggacgccccgaccgcgttacgccagttaaatctgtctcccctgacacttctgcctaaagaaggtattgctatgattaatgggacctcagtcatgactggcatcgcagctaactgcgtatacgacacccagatcctgactgcgattgcaatgggtgttcacgctctggatatccaggccctgaacggcaccaaccagtctttccacccgtttatccataactctaagccgcacccaggtcagctgtgggcggctgatcagatgatatcattgctggctaactcgcaactggtacgggacgagctggacggcaaacatgattaccgcgaccacgagctgatccaggatcgttatagcctgcgttgccttccgcagtacctgggtccgattgtggacggtatctcacagatagcaaaacaaatcgaaattgaaattaactccgttactgataaccctctgattgacgtcgataaccaggcgtcgtaccacggcggaaatttcctgggtcagtatgttggcatgggtatggaccaccttcgctactatatcggcctgctggcgaaacacctggatgtgcagattgcgctgctagctagtcccgaatttagcaacggactgccgccatctttattgggcaaccgtgaacgtaaggttaacatgggtctgaaaggtttacaaatctgtggcaattccatcatgccgctgctgacgttctacggcaatagcatcgccgaccgctttccgacccatgcagagcaattcaaccagaatatcaactctcagggctacacctccgcaacgctggcgcgacgtagtgttgatatcttccaaaactacgttgcgattgccctgatgtttggcgtccaggctgtagacctgaggacttataaaaagactggccattacgatgcgcgtgcttgcctctctccggctaccgaacgcctgtattccgccgtgcgtcacgtagttggtcagaaacctacttcagatcgcccatacatctggaacgataacgagcagggtctggatgaacacatcgctcgcatctccgctgacattgccgctggcggagtaattgttcaagctgtacaggatatcctgccgtgcctgcactaaccggcttatcggtcagtttcacctgatttacgtaaaaacccgcttcggcgggtttttgcttttggaggggcagaaagatgaatgactgtccacgacgctatacccaaaagaaa

SEQ ID NO: 298 - DNA, 5122 bp, synthetic construct
  source 1..5122: mol_type = other DNA
aggctaggtggaggctcagtgatgataagtctgcgatggtggatgcatgtgtcatggtcatagctgtttcctgtgtgaaattgttatccgctcagagggcacaatcctattccgcgctatccgacaatctccaagacattaggtggagttcagttcggcgagcggaaatggcttacgaacggggcggagatttcctggaagatgccaggaagatacttaacagggaagtgagagggccgcggcaaagccgtttttccataggctccgcccccctgacaagcatcacgaaatctgacgctcaaatcagtggtggcgaaacccgacaggactataaagataccaggcgtttccccctggcggctccctcgtgcgctctcctgttcctgcctttcggtttaccggtgtcattccgctgttatggccgcgtttgtctcattccacgcctgacactcagttccgggtaggcagttcgctccaagctggactgtatgcacgaaccccccgttcagtccgaccgctgcgccttatccggtaactatcgtcttgagtccaacccggaaagacatgcaaaagcaccactggcagcagccactggtaattgatttagaggagttagtcttgaagtcatgcgccggttaaggctaaactgaaaggacaagttttggtgactgcgctcctccaagccagttacctcggttcaaagagttggtagctcagagaaccttcgaaaaaccgccctgcaaggcggttttttcgttttcagagcaagagattacgcgcagaccaaaacgatctcaagaagatcatcttattaagtctgacgctctattcaacaaagccgccgtccatgggtagggggcttcaaatcgtcctcgtgataccaattcggagcctgcttttttgtacaaacttgttgataatggcaattcaaggatcttcacctagatccttttaaattaaaaatgaagttttaaatcaatctaaagtatatatgagtaaacttggtctgacagttaccaatgcttaatcagtgaggcacctatctcagcgatctgtctatttcgttcatccatagttgcctgactccccgtcgtgtagataactacgatacgggagggcttaccatctggccccagtgctgcaatgataccgcgagagccacgctcaccggctccagatttatcagcaataaaccagccagccggaagggccgagcgcagaagtggtcctgcaactttatccgcctccatccagtctattaattgttgccgggaagctagagtaagtagttcgccagttaatagtttgcgcaacgttgttgccattgctacaggcatcgtggtgtcacgctcgtcgtttggtatggcttcattcagctccggttcccaacgatcaaggcgagttacatgatcccccatgttgtgcaaaaaagcggttagctccttcggtcctccgatcgttgtcagaagtaagttggccgcagtgttatcactcatggttatggcagcactgcataattctcttactgtcatgccatccgtaagatgcttttctgtgactggtgagtactcaaccaagtcattctgagaatagtgtatgcggcgaccgagttgctcttgcccggcgtcaatacgggataataccgcgccacatagcagaactttaaaagtgctcatcattggaaaacgttcttcggggcgaaaactctcaaggatcttaccgctgttgagatccagttcgatgtaacccactcgtgcacccaactgatcttcagcatcttttactttcaccagcgtttctgggtgagcaaaaacaggaaggcaaaatgccgcaaaaaagggaataagggcgacacggaaatgttgaatactcatactcttcctttttcaatattattgaagcatttatcagggttattgtctcatgagcggatacatatttgaatgtatttagaaaaataaacaaataggggttccgcgcacatttccccgaaaagtgccagatacctgaaacaaaacccatcgtacggccaaggaagtctccaataactgtgatccaccacaagcgccagggttttcccagtcacgacgttgtaaaacgacggccagtcatgcataatccgcacgcatctggaataaggaagtgccattccgcctgacctttgcctatgaggaccaaaacgaaaaaacaccctttcgggtgtcttttctggaatttggtaccgagaggctccatgattcagtatgacttgcctttggtcgaaaaaaaaagcccgcactgtcaggtgcgggcttttttctgtgtttccttattaggacccactttcacatttaagttgtttttctaatccgcatatgatcaattcaaggccgaataagaaggctggctctgcaccttggtgatcaaataattcgatagcttgtcgtaataatggcggcatactatcagtagtaggtgtttccctttcttctttagcgacttgatgctcttgatcttccaatacgcaacctaaagtaaaatgccccacagcgctgagtgcatataatgcattctctagtgaaaaaccttgttggcataaaaaggctaattgattttcgagagtttcatactgtttttctgtaggccgtgtacctaaatgtacttttgctccatcgcgatgacttagtaaagcacatctaaaacttttagcgttattacgtaaaaaatcttgccagctttccccttctaaagggcaaaagtgagtatggtgcctatctaacatctcaatggctaaggcgtcgagcaaagcccgcttattttttacatgccaatacaatgtaggctgctctacacctagcttctgggcgagtttacgggttgttaaaccttcgattccgacctcattaagcagctctaatgcgctgttaatcactttacttttatctaatctggacatattcaccaccctgaattgactctcttccgggcgctatcatgccataccgcgaaaggttttgcgccattcgatggcgcgccgccattgcttgtgcaatgtacatcagagattttgagacacaaccaattattgaaggcctccctaacggggggcctttttttgtttctggtcccccgcttaacgatcgttggctgttttcagcaggacgcactgacctccctatcagtgatagagattgacatccctatcagtgatagagatactgagcacagctgtcaccggatgtgctttccggtctgatgagtccgtgaggacgaaacagcctctacaaataattttgtttaaatcacacgggtaaggaggtatttaaatgaaaacactgtcccaagcacagtcgaagacgagtagccagcagttttctttcaccggtaattctagcgctaacgtgattatcggcaaccagaaactaactatcaacgacgtcgcccgcgttgctcggaacgggaccttagtaagcctgactaacaacactgatatacttcaaggcattcaggcgtcctgtgattatatcaataacgcagttgagtctggtgaaccaatttacggtgtgacctcaggcttcggcggtatggcgaacgttgctatcagccgtgaacaggcctccgaactgcaaagcaatttggtatggtatctgaaaactggtgctgggaacaaactccctttggcggacgtacgtgcagcaatgctgctgcgcgccaactcgcatatgcgtggcgcgtccggtatccgtctggagctgatcaaacgtatggaaatcttcttgaacgctggtgttactccgtacgtttatgaatttggatctatcggcgcttctggagatctggtcccgctgagctacattacgggttccctgattggccttgacccgagcttcaaggtggatttcaacggcaaagaaatggacgccccgaccgcgttacgccagttaaatctgtctcccctgacacttctgcctaaagaaggtattgctatgctaaatgggacctcagtcatgactggcatcgcagctaactgcgtatacgacacccagatcctgactgcgattgcaatgggtgttcacgctctggatatccaggccctgaacggcaccaaccagtctttccacccgtttatccataactctaagccgcacccaggtcagctgtgggcggctgatcagatgatatcattgctggctaactcgcaactggtacgggacgagctggacggcaaacatgattaccgcgaccacgagctgatccaggatcgttatagcctgcgttgccttccgcagtacctgggtccgattgtggacggtatctcacagatagcaaaacaaatcgaaattgaaattaactccgttactgataaccctctgattgacgtcgataaccaggcgtcgtaccacggcggaaatttcctgggtcagtatgttggcatgggtatggaccaccttcgctactatatcggcctgctggcgaaacacctggatgtgcagattgcgctgctagctagtcccgaatttagcaacggactgccgccatctttattgggcaaccgtgaacgtaaggttaacatgggtctgaaaggtttacaaatctgtggcaattccatcatgccgctgctgacgttctacggcaatagcatcgccgaccgctttccgacccatgcagagcaattcaaccagaatatcaactctcagggctacacctccgcaacgctggcgcgacgtagtgttgatatcttccaaaactacgttgcgattgccctgatgtttggcgtccaggctgtagacctgaggacttataaaaagactggccattacgatgcgcgtgcttgcctctctccggctaccgaacgcctgtattccgccgtgcgtcacgtagttggtcagaaacctacttcagatcgcccatacatctggaacgataacgagcagggtctggatgaacacatcgctcgcatctccgctgacattgccgctggcggagtaattgttcaagctgtacaggatatcctgccgtgcctgcactaaccggcttatcggtcagtttcacctgatttacgtaaaaacccgcttcggcgggtttttgcttttggaggggcagaaagatgaatgactgtccacgacgctatacccaaaagaaa

SEQ ID NO: 299 - DNA, 5122 bp, synthetic construct
  source 1..5122: mol_type = other DNA
aggctaggtggaggctcagtgatgataagtctgcgatggtggatgcatgtgtcatggtcatagctgtttcctgtgtgaaattgttatccgctcagagggcacaatcctattccgcgctatccgacaatctccaagacattaggtggagttcagttcggcgagcggaaatggcttacgaacggggcggagatttcctggaagatgccaggaagatacttaacagggaagtgagagggccgcggcaaagccgtttttccataggctccgcccccctgacaagcatcacgaaatctgacgctcaaatcagtggtggcgaaacccgacaggactataaagataccaggcgtttccccctggcggctccctcgtgcgctctcctgttcctgcctttcggtttaccggtgtcattccgctgttatggccgcgtttgtctcattccacgcctgacactcagttccgggtaggcagttcgctccaagctggactgtatgcacgaaccccccgttcagtccgaccgctgcgccttatccggtaactatcgtcttgagtccaacccggaaagacatgcaaaagcaccactggcagcagccactggtaattgatttagaggagttagtcttgaagtcatgcgccggttaaggctaaactgaaaggacaagttttggtgactgcgctcctccaagccagttacctcggttcaaagagttggtagctcagagaaccttcgaaaaaccgccctgcaaggcggttttttcgttttcagagcaagagattacgcgcagaccaaaacgatctcaagaagatcatcttattaagtctgacgctctattcaacaaagccgccgtccatgggtagggggcttcaaatcgtcctcgtgataccaattcggagcctgcttttttgtacaaacttgttgataatggcaattcaaggatcttcacctagatccttttaaattaaaaatgaagttttaaatcaatctaaagtatatatgagtaaacttggtctgacagttaccaatgcttaatcagtgaggcacctatctcagcgatctgtctatttcgttcatccatagttgcctgactccccgtcgtgtagataactacgatacgggagggcttaccatctggccccagtgctgcaatgataccgcgagagccacgctcaccggctccagatttatcagcaataaaccagccagccggaagggccgagcgcagaagtggtcctgcaactttatccgcctccatccagtctattaattgttgccgggaagctagagtaagtagttcgccagttaatagtttgcgcaacgttgttgccattgctacaggcatcgtggtgtcacgctcgtcgtttggtatggcttcattcagctccggttcccaacgatcaaggcgagttacatgatcccccatgttgtgcaaaaaagcggttagctccttcggtcctccgatcgttgtcagaagtaagttggccgcagtgttatcactcatggttatggcagcactgcataattctcttactgtcatgccatccgtaagatgcttttctgtgactggtgagtactcaaccaagtcattctgagaatagtgtatgcggcgaccgagttgctcttgcccggcgtcaatacgggataataccgcgccacatagcagaactttaaaagtgctcatcattggaaaacgttcttcggggcgaaaactctcaaggatcttaccgctgttgagatccagttcgatgtaacccactcgtgcacccaactgatcttcagcatcttttactttcaccagcgtttctgggtgagcaaaaacaggaaggcaaaatgccgcaaaaaagggaataagggcgacacggaaatgttgaatactcatactcttcctttttcaatattattgaagcatttatcagggttattgtctcatgagcggatacatatttgaatgtatttagaaaaataaacaaataggggttccgcgcacatttccccgaaaagtgccagatacctgaaacaaaacccatcgtacggccaaggaagtctccaataactgtgatccaccacaagcgccagggttttcccagtcacgacgttgtaaaacgacggccagtcatgcataatccgcacgcatctggaataaggaagtgccattccgcctgacctttgcctatgaggaccaaaacgaaaaaacaccctttcgggtgtcttttctggaatttggtaccgagaggctccatgattcagtatgacttgcctttggtcgaaaaaaaaagcccgcactgtcaggtgcgggcttttttctgtgtttccttattaggacccactttcacatttaagttgtttttctaatccgcatatgatcaattcaaggccgaataagaaggctggctctgcaccttggtgatcaaataattcgatagcttgtcgtaataatggcggcatactatcagtagtaggtgtttccctttcttctttagcgacttgatgctcttgatcttccaatacgcaacctaaagtaaaatgccccacagcgctgagtgcatataatgcattctctagtgaaaaaccttgttggcataaaaaggctaattgattttcgagagtttcatactgtttttctgtaggccgtgtacctaaatgtacttttgctccatcgcgatgacttagtaaagcacatctaaaacttttagcgttattacgtaaaaaatcttgccagctttccccttctaaagggcaaaagtgagtatggtgcctatctaacatctcaatggctaaggcgtcgagcaaagcccgcttattttttacatgccaatacaatgtaggctgctctacacctagcttctgggcgagtttacgggttgttaaaccttcgattccgacctcattaagcagctctaatgcgctgttaatcactttacttttatctaatctggacatattcaccaccctgaattgactctcttccgggcgctatcatgccataccgcgaaaggttttgcgccattcgatggcgcgccgccattgcttgtgcaatgtacatcagagattttgagacacaaccaattattgaaggcctccctaacggggggcctttttttgtttctggtcccccgcttaacgatcgttggctgttttcagcaggacgcactgacctccctatcagtgatagagattgacatccctatcagtgatagagatactgagcacagctgtcaccggatgtgctttccggtctgatgagtccgtgaggacgaaacagcctctacaaataattttgtttaaatcacacgggtaaggaggtatttaaatgaaaacactgtcccaagcacagtcgaagacgagtagccagcagttttctttcaccggtaattctagcgctaacgtgattatcggcaaccagaaactaactatcaacgacgtcgcccgcgttgctcggaacgggaccttagtaagcctgactaacaacactgatatacttcaaggcattcaggcgtcctgtgattatatcaataacgcagttgagtctggtgaaccaatttacggtgtgacctcaggcttcggcggtatggcgaacgttgctatcagccgtgaacaggcctccgaactgcaagagaatttggtatggtatatgaaaactggtgctgggaacaaactccctttggcggacgtacgtgcagcaatgctgctgcgcgccaactcgcatatgcgtggcgcgtccggtatccgtctggagctgatcaaacgtatggaaatcttcttgaacgctggtgttactccgtacgtttatgaatttggatctatcggcgcttctggagatctggtcccgctgagctacattacgggttccctgattggccttgacccgagcttcaaggtggatttcaacggcaaagaaatggacgccccgaccgcgttacgccagttaaatctgtctcccctgacacttctgcctaaagaagccctagctatggtcaatgggacctcagtcatgactggcatcgcagctaactgcgtatacgacacccagatcctgactgcgattgcaatgggtgttcacgctctggatatccaggccctgaacggcaccaaccagtctttccacccgtttatccataactctaagccgcacccaggtcagctgtgggcggctgatcagatgatatcattgctggctaactcgcaactggtacgggacgagctggacggcaaacatgattaccgcgaccacgagctgatccaggatcgttatagcctgcgttgccttccgcagtacctgggtccgattgtggacggtatctcacagatagcaaaacaaatcgaaattgaaattaactccgttactgataaccctctgattgacgtcgataaccaggcgtcgtaccacggcggaaatttcctgggtcagtatgttggcatgggtatggaccaccttcgctactatatcggcctgctggcgaaacacctggatgtgcagattgcgctgctagctagtcccgaatttagcaacggactgccgccatctttattgggcaaccgtgaacgtaaggttaacatgggtctgaaaggtttacaaatctgtggcaattccatcatgccgctgctgacgttctacggcaatagcatcgccgaccgctttccgacccatgcagagcaattcaaccagaatatcaactctcagggctacacctccgcaacgctggcgcgacgtagtgttgatatcttccaaaactacgttgcgattgccctgatgtttggcgtccaggctgtagacctgaggacttataaaaagactggccattacgatgcgcgtgcttgcctctctccggctaccgaacgcctgtattccgccgtgcgtcacgtagttggtcagaaacctacttcagatcgcccatacatctggaacgataacgagcagggtctggatgaacacatcgctcgcatctccgctgacattgccgctggcggagtaattgttcaagctgtacaggatatcctgccgtgcctgcactaaccggcttatcggtcagtttcacctgatttacgtaaaaacccgcttcggcgggtttttgcttttggaggggcagaaagatgaatgactgtccacgacgctatacccaaaagaaa

SEQ ID NO: 300 - DNA, 5122 bp, synthetic construct
  source 1..5122: mol_type = other DNA
aggctaggtggaggctcagtgatgataagtctgcgatggtggatgcatgtgtcatggtcatagctgtttcctgtgtgaaattgttatccgctcagagggcacaatcctattccgcgctatccgacaatctccaagacattaggtggagttcagttcggcgagcggaaatggcttacgaacggggcggagatttcctggaagatgccaggaagatacttaacagggaagtgagagggccgcggcaaagccgtttttccataggctccgcccccctgacaagcatcacgaaatctgacgctcaaatcagtggtggcgaaacccgacaggactataaagataccaggcgtttccccctggcggctccctcgtgcgctctcctgttcctgcctttcggtttaccggtgtcattccgctgttatggccgcgtttgtctcattccacgcctgacactcagttccgggtaggcagttcgctccaagctggactgtatgcacgaaccccccgttcagtccgaccgctgcgccttatccggtaactatcgtcttgagtccaacccggaaagacatgcaaaagcaccactggcagcagccactggtaattgatttagaggagttagtcttgaagtcatgcgccggttaaggctaaactgaaaggacaagttttggtgactgcgctcctccaagccagttacctcggttcaaagagttggtagctcagagaaccttcgaaaaaccgccctgcaaggcggttttttcgttttcagagcaagagattacgcgcagaccaaaacgatctcaagaagatcatcttattaagtctgacgctctattcaacaaagccgccgtccatgggtagggggcttcaaatcgtcctcgtgataccaattcggagcctgcttttttgtacaaacttgttgataatggcaattcaaggatcttcacctagatccttttaaattaaaaatgaagttttaaatcaatctaaagtatatatgagtaaacttggtctgacagttaccaatgcttaatcagtgaggcacctatctcagcgatctgtctatttcgttcatccatagttgcctgactccccgtcgtgtagataactacgatacgggagggcttaccatctggccccagtgctgcaatgataccgcgagagccacgctcaccggctccagatttatcagcaataaaccagccagccggaagggccgagcgcagaagtggtcctgcaactttatccgcctccatccagtctattaattgttgccgggaagctagagtaagtagttcgccagttaatagtttgcgcaacgttgttgccattgctacaggcatcgtggtgtcacgctcgtcgtttggtatggcttcattcagctccggttcccaacgatcaaggcgagttacatgatcccccatgttgtgcaaaaaagcggttagctccttcggtcctccgatcgttgtcagaagtaagttggccgcagtgttatcactcatggttatggcagcactgcataattctcttactgtcatgccatccgtaagatgcttttctgtgactggtgagtactcaaccaagtcattctgagaatagtgtatgcggcgaccgagttgctcttgcccggcgtcaatacgggataataccgcgccacatagcagaactttaaaagtgctcatcattggaaaacgttcttcggggcgaaaactctcaaggatcttaccgctgttgagatccagttcgatgtaacccactcgtgcacccaactgatcttcagcatcttttactttcaccagcgtttctgggtgagcaaaaacaggaaggcaaaatgccgcaaaaaagggaataagggcgacacggaaatgttgaatactcatactcttcctttttcaatattattgaagcatttatcagggttattgtctcatgagcggatacatatttgaatgtatttagaaaaataaacaaataggggttccgcgcacatttccccgaaaagtgccagatacctgaaacaaaacccatcgtacggccaaggaagtctccaataactgtgatccaccacaagcgccagggttttcccagtcacgacgttgtaaaacgacggccagtcatgcataatccgcacgcatctggaataaggaagtgccattccgcctgacctttgcctatgaggaccaaaacgaaaaaacaccctttcgggtgtcttttctggaatttggtaccgagaggctccatgattcagtatgacttgcctttggtcgaaaaaaaaagcccgcactgtcaggtgcgggcttttttctgtgtttccttattaggacccactttcacatttaagttgtttttctaatccgcatatgatcaattcaaggccgaataagaaggctggctctgcaccttggtgatcaaataattcgatagcttgtcgtaataatggcggcatactatcagtagtaggtgtttccctttcttctttagcgacttgatgctcttgatcttccaatacgcaacctaaagtaaaatgccccacagcgctgagtgcatataatgcattctctagtgaaaaaccttgttggcataaaaaggctaattgattttcgagagtttcatactgtttttctgtaggccgtgtacctaaatgtacttttgctccatcgcgatgacttagtaaagcacatctaaaacttttagcgttattacgtaaaaaatcttgccagctttccccttctaaagggcaaaagtgagtatggtgcctatctaacatctcaatggctaaggcgtcgagcaaagcccgcttattttttacatgccaatacaatgtaggctgctctacacctagcttctgggcgagtttacgggttgttaaaccttcgattccgacctcattaagcagctctaatgcgctgttaatcactttacttttatctaatctggacatattcaccaccctgaattgactctcttccgggcgctatcatgccataccgcgaaaggttttgcgccattcgatggcgcgccgccattgcttgtgcaatgtacatcagagattttgagacacaaccaattattgaaggcctccctaacggggggcctttttttgtttctggtcccccgcttaacgatcgttggctgttttcagcaggacgcactgacctccctatcagtgatagagattgacatccctatcagtgatagagatactgagcacagctgtcaccggatgtgctttccggtctgatgagtccgtgaggacgaaacagcctctacaaataattttgtttaaatcacacgggtaaggaggtatttaaatgaaaacactgtcccaagcacagtcgaagacgagtagccagcagttttctttcaccggtaattctagcgctaacgtgattatcggcaaccagaaactaactatcaacgacgtcgcccgcgttgctcggaacgggaccttagtaagcctgactaacaacactgatatacttcaaggcattcaggcgtcctgtgattatatcaataacgcagttgagtctggtgaaccaatttacggtgtgacctcaggcttcggcggtatggcgaacgttgctatcagccgtgaacaggcctccgaactgcaagagaatatggtatggtctacgaaaactggtgctgggaacaaactccctttggcggacgtacgtgcagcaatgctgctgcgcgccaactcgcatatgcgtggcgcgtccggtatccgtctggagctgatcaaacgtatggaaatcttcttgaacgctggtgttactccgtacgtttatgaatttggatctatcggcgcttctggagatctggtcccgctgagctacattacgggttccctgattggccttgacccgagcttcaaggtggatttcaacggcaaagaaatggacgccccgaccgcgttacgccagttaaatctgtctcccctgacacttctgcctaaagaaagtattgctatggtcaatgggacctcagtcatgactggcatcgcagctaactgcgtatacgacacccagatcctgactgcgattgcaatgggtgttcacgctctggatatccaggccctgaacggcaccaaccagtctttccacccgtttatccataactctaagccgcacccaggtcagctgtgggcggctgatcagatgatatcattgctggctaactcgcaactggtacgggacgagctggacggcaaacatgattaccgcgaccacgagctgatccaggatcgttatagcctgcgttgccttccgcagtacctgggtccgattgtggacggtatctcacagatagcaaaacaaatcgaaattgaaattaactccgttactgataaccctctgattgacgtcgataaccaggcgtcgtaccacggcggaaatttcctgggtcagtatgttggcatgggtatggaccaccttcgctactatatcggcctgctggcgaaacacctggatgtgcagattgcgctgctagctagtcccgaatttagcaacggactgccgccatctttattgggcaaccgtgaacgtaaggttaacatgggtctgaaaggtttacaaatctgtggcaattccatcatgccgctgctgacgttctacggcaatagcatcgccgaccgctttccgacccatgcagagcaattcaaccagaatatcaactctcagggctacacctccgcaacgctggcgcgacgtagtgttgatatcttccaaaactacgttgcgattgccctgatgtttggcgtccaggctgtagacctgaggacttataaaaagactggccattacgatgcgcgtgcttgcctctctccggctaccgaacgcctgtattccgccgtgcgtcacgtagttggtcagaaacctacttcagatcgcccatacatctggaacgataacgagcagggtctggatgaacacatcgctcgcatctccgctgacattgccgctggcggagtaattgttcaagctgtacaggatatcctgccgtgcctgcactaaccggcttatcggtcagtttcacctgatttacgtaaaaacccgcttcggcgggtttttgcttttggaggggcagaaagatgaatgactgtccacgacgctatacccaaaagaaa

SEQ ID NO: 301 - DNA, 5122 bp, synthetic construct
  source 1..5122: mol_type = other DNA
aggctaggtggaggctcagtgatgataagtctgcgatggtggatgcatgtgtcatggtcatagctgtttcctgtgtgaaattgttatccgctcagagggcacaatcctattccgcgctatccgacaatctccaagacattaggtggagttcagttcggcgagcggaaatggcttacgaacggggcggagatttcctggaagatgccaggaagatacttaacagggaagtgagagggccgcggcaaagccgtttttccataggctccgcccccctgacaagcatcacgaaatctgacgctcaaatcagtggtggcgaaacccgacaggactataaagataccaggcgtttccccctggcggctccctcgtgcgctctcctgttcctgcctttcggtttaccggtgtcattccgctgttatggccgcgtttgtctcattccacgcctgacactcagttccgggtaggcagttcgctccaagctggactgtatgcacgaaccccccgttcagtccgaccgctgcgccttatccggtaactatcgtcttgagtccaacccggaaagacatgcaaaagcaccactggcagcagccactggtaattgatttagaggagttagtcttgaagtcatgcgccggttaaggctaaactgaaaggacaagttttggtgactgcgctcctccaagccagttacctcggttcaaagagttggtagctcagagaaccttcgaaaaaccgccctgcaaggcggttttttcgttttcagagcaagagattacgcgcagaccaaaacgatctcaagaagatcatcttattaagtctgacgctctattcaacaaagccgccgtccatgggtagggggcttcaaatcgtcctcgtgataccaattcggagcctgcttttttgtacaaacttgttgataatggcaattcaaggatcttcacctagatccttttaaattaaaaatgaagttttaaatcaatctaaagtatatatgagtaaacttggtctgacagttaccaatgcttaatcagtgaggcacctatctcagcgatctgtctatttcgttcatccatagttgcctgactccccgtcgtgtagataactacgatacgggagggcttaccatctggccccagtgctgcaatgataccgcgagagccacgctcaccggctccagatttatcagcaataaaccagccagccggaagggccgagcgcagaagtggtcctgcaactttatccgcctccatccagtctattaattgttgccgggaagctagagtaagtagttcgccagttaatagtttgcgcaacgttgttgccattgctacaggcatcgtggtgtcacgctcgtcgtttggtatggcttcattcagctccggttcccaacgatcaaggcgagttacatgatcccccatgttgtgcaaaaaagcggttagctccttcggtcctccgatcgttgtcagaagtaagttggccgcagtgttatcactcatggttatggcagcactgcataattctcttactgtcatgccatccgtaagatgcttttctgtgactggtgagtactcaaccaagtcattctgagaatagtgtatgcggcgaccgagttgctcttgcccggcgtcaatacgggataataccgcgccacatagcagaactttaaaagtgctcatcattggaaaacgttcttcggggcgaaaactctcaaggatcttaccgctgttgagatccagttcgatgtaacccactcgtgcacccaactgatcttcagcatcttttactttcaccagcgtttctgggtgagcaaaaacaggaaggcaaaatgccgcaaaaaagggaataagggcgacacggaaatgttgaatactcatactcttcctttttcaatattattgaagcatttatcagggttattgtctcatgagcggatacatatttgaatgtatttagaaaaataaacaaataggggttccgcgcacatttccccgaaaagtgccagatacctgaaacaaaacccatcgtacggccaaggaagtctccaataactgtgatccaccacaagcgccagggttttcccagtcacgacgttgtaaaacgacggccagtcatgcataatccgcacgcatctggaataaggaagtgccattccgcctgacctttgcctatgaggaccaaaacgaaaaaacaccctttcgggtgtcttttctggaatttggtaccgagaggctccatgattcagtatgacttgcctttggtcgaaaaaaaaagcccgcactgtcaggtgcgggcttttttctgtgtttccttattaggacccactttcacatttaagttgtttttctaatccgcatatgatcaattcaaggccgaataagaaggctggctctgcaccttggtgatcaaataattcgatagcttgtcgtaataatggcggcatactatcagtagtaggtgtttccctttcttctttagcgacttgatgctcttgatcttccaatacgcaacctaaagtaaaatgccccacagcgctgagtgcatataatgcattctctagtgaaaaaccttgttggcataaaaaggctaattgattttcgagagtttcatactgtttttctgtaggccgtgtacctaaatgtacttttgctccatcgcgatgacttagtaaagcacatctaaaacttttagcgttattacgtaaaaaatcttgccagctttccccttctaaagggcaaaagtgagtatggtgcctatctaacatctcaatggctaaggcgtcgagcaaagcccgcttattttttacatgccaatacaatgtaggctgctctacacctagcttctgggcgagtttacgggttgttaaaccttcgattccgacctcattaagcagctctaatgcgctgttaatcactttacttttatctaatctggacatattcaccaccctgaattgactctcttccgggcgctatcatgccataccgcgaaaggttttgcgccattcgatggcgcgccgccattgcttgtgcaatgtacatcagagattttgagacacaaccaattattgaaggcctccctaacggggggcctttttttgtttctggtcccccgcttaacgatcgttggctgttttcagcaggacgcactgacctccctatcagtgatagagattgacatccctatcagtgatagagatactgagcacagctgtcaccggatgtgctttccggtctgatgagtccgtgaggacgaaacagcctctacaaataattttgtttaaatcacacgggtaaggaggtatttaaatgaaaacactgtcccaagcacagtcgaagacgagtagccagcagttttctttcaccggtaattctagcgctaacgtgattatcggcaaccagaaactaactatcaacgacgtcgcccgcgttgctcggaacgggaccttagtaagcctgactaacaacactgatatacttcaaggcattcaggcgtcctgtgattatatcaataacgcagttgagtctggtgaaccaatttacggtgtgacctcaggcttcggcggtatggcgaacgttgctatcagccgtgaacaggcctccgaactgcaatcgaatgtggtatggcatcacaaaactggtgctgggaacaaactccctttggcggacgtacgtgcagcaatgctgctgcgcgccaactcgcatatgcgtggcgcgtccggtatccgtctggagctgatcaaacgtatggaaatcttcttgaacgctggtgttactccgtacgtttatgaatttggatctatcggcgcttctggagatctggtcccgctgagctacattacgggttccctgattggccttgacccgagcttcaaggtggatttcaacggcaaagaaatggacgccccgaccgcgttacgccagttaaatctgtctcccctgacacttctgcctaaagaaggtctagctatgatgaatgggacctcagtcatgactggcatcgcagctaactgcgtatacgacacccagatcctgactgcgattgcaatgggtgttcacgctctggatatccaggccctgaacggcaccaaccagtctttccacccgtttatccataactctaagccgcacccaggtcagctgtgggcggctgatcagatgatatcattgctggctaactcgcaactggtacgggacgagctggacggcaaacatgattaccgcgaccacgagctgatccaggatcgttatagcctgcgttgccttccgcagtacctgggtccgattgtggacggtatctcacagatagcaaaacaaatcgaaattgaaattaactccgttactgataaccctctgattgacgtcgataaccaggcgtcgtaccacggcggaaatttcctgggtcagtatgttggcatgggtatggaccaccttcgctactatatcggcctgctggcgaaacacctggatgtgcagattgcgctgctagctagtcccgaatttagcaacggactgccgccatctttattgggcaaccgtgaacgtaaggttaacatgggtctgaaaggtttacaaatctgtggcaattccatcatgccgctgctgacgttctacggcaatagcatcgccgaccgctttccgacccatgcagagcaattcaaccagaatatcaactctcagggctacacctccgcaacgctggcgcgacgtagtgttgatatcttccaaaactacgttgcgattgccctgatgtttggcgtccaggctgtagacctgaggacttataaaaagactggccattacgatgcgcgtgcttgcctctctccggctaccgaacgcctgtattccgccgtgcgtcacgtagttggtcagaaacctacttcagatcgcccatacatctggaacgataacgagcagggtctggatgaacacatcgctcgcatctccgctgacattgccgctggcggagtaattgttcaagctgtacaggatatcctgccgtgcctgcactaaccggcttatcggtcagtttcacctgatttacgtaaaaacccgcttcggcgggtttttgcttttggaggggcagaaagatgaatgactgtccacgacgctatacccaaaagaaa

SEQ ID NO: 302 - DNA, 5122 bp, synthetic construct
  source 1..5122: mol_type = other DNA
aggctaggtggaggctcagtgatgataagtctgcgatggtggatgcatgtgtcatggtcatagctgtttcctgtgtgaaattgttatccgctcagagggcacaatcctattccgcgctatccgacaatctccaagacattaggtggagttcagttcggcgagcggaaatggcttacgaacggggcggagatttcctggaagatgccaggaagatacttaacagggaagtgagagggccgcggcaaagccgtttttccataggctccgcccccctgacaagcatcacgaaatctgacgctcaaatcagtggtggcgaaacccgacaggactataaagataccaggcgtttccccctggcggctccctcgtgcgctctcctgttcctgcctttcggtttaccggtgtcattccgctgttatggccgcgtttgtctcattccacgcctgacactcagttccgggtaggcagttcgctccaagctggactgtatgcacgaaccccccgttcagtccgaccgctgcgccttatccggtaactatcgtcttgagtccaacccggaaagacatgcaaaagcaccactggcagcagccactggtaattgatttagaggagttagtcttgaagtcatgcgccggttaaggctaaactgaaaggacaagttttggtgactgcgctcctccaagccagttacctcggttcaaagagttggtagctcagagaaccttcgaaaaaccgccctgcaaggcggttttttcgttttcagagcaagagattacgcgcagaccaaaacgatctcaagaagatcatcttattaagtctgacgctctattcaacaaagccgccgtccatgggtagggggcttcaaatcgtcctcgtgataccaattcggagcctgcttttttgtacaaacttgttgataatggcaattcaaggatcttcacctagatccttttaaattaaaaatgaagttttaaatcaatctaaagtatatatgagtaaacttggtctgacagttaccaatgcttaatcagtgaggcacctatctcagcgatctgtctatttcgttcatccatagttgcctgactccccgtcgtgtagataactacgatacgggagggcttaccatctggccccagtgctgcaatgataccgcgagagccacgctcaccggctccagatttatcagcaataaaccagccagccggaagggccgagcgcagaagtggtcctgcaactttatccgcctccatccagtctattaattgttgccgggaagctagagtaagtagttcgccagttaatagtttgcgcaacgttgttgccattgctacaggcatcgtggtgtcacgctcgtcgtttggtatggcttcattcagctccggttcccaacgatcaaggcgagttacatgatcccccatgttgtgcaaaaaagcggttagctccttcggtcctccgatcgttgtcagaagtaagttggccgcagtgttatcactcatggttatggcagcactgcataattctcttactgtcatgccatccgtaagatgcttttctgtgactggtgagtactcaaccaagtcattctgagaatagtgtatgcggcgaccgagttgctcttgcccggcgtcaatacgggataataccgcgccacatagcagaactttaaaagtgctcatcattggaaaacgttcttcggggcgaaaactctcaaggatcttaccgctgttgagatccagttcgatgtaacccactcgtgcacccaactgatcttcagcatcttttactttcaccagcgtttctgggtgagcaaaaacaggaaggcaaaatgccgcaaaaaagggaataagggcgacacggaaatgttgaatactcatactcttcctttttcaatattattgaagcatttatcagggttattgtctcatgagcggatacatatttgaatgtatttagaaaaataaacaaataggggttccgcgcacatttccccgaaaagtgccagatacctgaaacaaaacccatcgtacggccaaggaagtctccaataactgtgatccaccacaagcgccagggttttcccagtcacgacgttgtaaaacgacggccagtcatgcataatccgcacgcatctggaataaggaagtgccattccgcctgacctttgcctatgaggaccaaaacgaaaaaacaccctttcgggtgtcttttctggaatttggtaccgagaggctccatgattcagtatgacttgcctttggtcgaaaaaaaaagcccgcactgtcaggtgcgggcttttttctgtgtttccttattaggacccactttcacatttaagttgtttttctaatccgcatatgatcaattcaaggccgaataagaaggctggctctgcaccttggtgatcaaataattcgatagcttgtcgtaataatggcggcatactatcagtagtaggtgtttccctttcttctttagcgacttgatgctcttgatcttccaatacgcaacctaaagtaaaatgccccacagcgctgagtgcatataatgcattctctagtgaaaaaccttgttggcataaaaaggctaattgattttcgagagtttcatactgtttttctgtaggccgtgtacctaaatgtacttttgctccatcgcgatgacttagtaaagcacatctaaaacttttagcgttattacgtaaaaaatcttgccagctttccccttctaaagggcaaaagtgagtatggtgcctatctaacatctcaatggctaaggcgtcgagcaaagcccgcttattttttacatgccaatacaatgtaggctgctctacacctagcttctgggcgagtttacgggttgttaaaccttcgattccgacctcattaagcagctctaatgcgctgttaatcactttacttttatctaatctggacatattcaccaccctgaattgactctcttccgggcgctatcatgccataccgcgaaaggttttgcgccattcgatggcgcgccgccattgcttgtgcaatgtacatcagagattttgagacacaaccaattattgaaggcctccctaacggggggcctttttttgtttctggtcccccgcttaacgatcgttggctgttttcagcaggacgcactgacctccctatcagtgatagagattgacatccctatcagtgatagagatactgagcacagctgtcaccggatgtgctttccggtctgatgagtccgtgaggacgaaacagcctctacaaataattttgtttaaatcacacgggtaaggaggtatttaaatgaaaacactgtcccaagcacagtcgaagacgagtagccagcagttttctttcaccggtaattctagcgctaacgtgattatcggcaaccagaaactaactatcaacgacgtcgcccgcgttgctcggaacgggaccttagtaagcctgactaacaacactgatatacttcaaggcattcaggcgtcctgtgattatatcaataacgcagttgagtctggtgaaccaatttacggtgtgacctcaggcttcggcggtatggcgaacgttgctatcagccgtgaacaggcctccgaactgcaagagaatttggtatggtatatgaaaactggtgctgggaacaaactccctttggcggacgtacgtgcagcaatgctgctgcgcgccaactcgcatatgcgtggcgcgtccggtatccgtctggagctgatcaaacgtatggaaatcttcttgaacgctggtgttactccgtacgtttatgaatttggatctatcggcgcttctggagatctggtcccgctgagctacattacgggttccctgattggccttgacccgagcttcaaggtggatttcaacggcaaagaaatggacgccccgaccgcgttacgccagttaaatctgtctcccctgacacttctgcctaaagaaggtattgctatgattaatgggacctcagtcatgactggcatcgcagctaactgcgtatacgacacccagatcctgactgcgattgcaatgggtgttcacgctctggatatccaggccctgaacggcaccaaccagtctttccacccgtttatccataactctaagccgcacccaggtcagctgtgggcggctgatcagatgatatcattgctggctaactcgcaactggtacgggacgagctggacggcaaacatgattaccgcgaccacgagctgatccaggatcgttatagcctgcgttgccttccgcagtacctgggtccgattgtggacggtatctcacagatagcaaaacaaatcgaaattgaaattaactccgttactgataaccctctgattgacgtcgataaccaggcgtcgtaccacggcggaaatttcctgggtcagtatgttggcatgggtatggaccaccttcgctactatatcggcctgctggcgaaacacctggatgtgcagattgcgctgctagctagtcccgaatttagcaacggactgccgccatctttattgggcaaccgtgaacgtaaggttaacatgggtctgaaaggtttacaaatctgtggcaattccatcatgccgctgctgacgttctacggcaatagcatcgccgaccgctttccgacccatgcagagcaattcaaccagaatatcaactctcagggctacacctccgcaacgctggcgcgacgtagtgttgatatcttccaaaactacgttgcgattgccctgatgtttggcgtccaggctgtagacctgaggacttataaaaagactggccattacgatgcgcgtgcttgcctctctccggctaccgaacgcctgtattccgccgtgcgtcacgtagttggtcagaaacctacttcagatcgcccatacatctggaacgataacgagcagggtctggatgaacacatcgctcgcatctccgctgacattgccgctggcggagtaattgttcaagctgtacaggatatcctgccgtgcctgcactaaccggcttatcggtcagtttcacctgatttacgtaaaaacccgcttcggcgggtttttgcttttggaggggcagaaagatgaatgactgtccacgacgctatacccaaaagaaa

SEQ ID NO: 303 - DNA, 5122 bp, synthetic construct
  source 1..5122: mol_type = other DNA
aggctaggtggaggctcagtgatgataagtctgcgatggtggatgcatgtgtcatggtcatagctgtttcctgtgtgaaattgttatccgctcagagggcacaatcctattccgcgctatccgacaatctccaagacattaggtggagttcagttcggcgagcggaaatggcttacgaacggggcggagatttcctggaagatgccaggaagatacttaacagggaagtgagagggccgcggcaaagccgtttttccataggctccgcccccctgacaagcatcacgaaatctgacgctcaaatcagtggtggcgaaacccgacaggactataaagataccaggcgtttccccctggcggctccctcgtgcgctctcctgttcctgcctttcggtttaccggtgtcattccgctgttatggccgcgtttgtctcattccacgcctgacactcagttccgggtaggcagttcgctccaagctggactgtatgcacgaaccccccgttcagtccgaccgctgcgccttatccggtaactatcgtcttgagtccaacccggaaagacatgcaaaagcaccactggcagcagccactggtaattgatttagaggagttagtcttgaagtcatgcgccggttaaggctaaactgaaaggacaagttttggtgactgcgctcctccaagccagttacctcggttcaaagagttggtagctcagagaaccttcgaaaaaccgccctgcaaggcggttttttcgttttcagagcaagagattacgcgcagaccaaaacgatctcaagaagatcatcttattaagtctgacgctctattcaacaaagccgccgtccatgggtagggggcttcaaatcgtcctcgtgataccaattcggagcctgcttttttgtacaaacttgttgataatggcaattcaaggatcttcacctagatccttttaaattaaaaatgaagttttaaatcaatctaaagtatatatgagtaaacttggtctgacagttaccaatgcttaatcagtgaggcacctatctcagcgatctgtctatttcgttcatccatagttgcctgactccccgtcgtgtagataactacgatacgggagggcttaccatctggccccagtgctgcaatgataccgcgagagccacgctcaccggctccagatttatcagcaataaaccagccagccggaagggccgagcgcagaagtggtcctgcaactttatccgcctccatccagtctattaattgttgccgggaagctagagtaagtagttcgccagttaatagtttgcgcaacgttgttgccattgctacaggcatcgtggtgtcacgctcgtcgtttggtatggcttcattcagctccggttcccaacgatcaaggcgagttacatgatcccccatgttgtgcaaaaaagcggttagctccttcggtcctccgatcgttgtcagaagtaagttggccgcagtgttatcactcatggttatggcagcactgcataattctcttactgtcatgccatccgtaagatgcttttctgtgactggtgagtactcaaccaagtcattctgagaatagtgtatgcggcgaccgagttgctcttgcccggcgtcaatacgggataataccgcgccacatagcagaactttaaaagtgctcatcattggaaaacgttcttcggggcgaaaactctcaaggatcttaccgctgttgagatccagttcgatgtaacccactcgtgcacccaactgatcttcagcatcttttactttcaccagcgtttctgggtgagcaaaaacaggaaggcaaaatgccgcaaaaaagggaataagggcgacacggaaatgttgaatactcatactcttcctttttcaatattattgaagcatttatcagggttattgtctcatgagcggatacatatttgaatgtatttagaaaaataaacaaataggggttccgcgcacatttccccgaaaagtgccagatacctgaaacaaaacccatcgtacggccaaggaagtctccaataactgtgatccaccacaagcgccagggttttcccagtcacgacgttgtaaaacgacggccagtcatgcataatccgcacgcatctggaataaggaagtgccattccgcctgacctttgcctatgaggaccaaaacgaaaaaacaccctttcgggtgtcttttctggaatttggtaccgagaggctccatgattcagtatgacttgcctttggtcgaaaaaaaaagcccgcactgtcaggtgcgggcttttttctgtgtttccttattaggacccactttcacatttaagttgtttttctaatccgcatatgatcaattcaaggccgaataagaaggctggctctgcaccttggtgatcaaataattcgatagcttgtcgtaataatggcggcatactatcagtagtaggtgtttccctttcttctttagcgacttgatgctcttgatcttccaatacgcaacctaaagtaaaatgccccacagcgctgagtgcatataatgcattctctagtgaaaaaccttgttggcataaaaaggctaattgattttcgagagtttcatactgtttttctgtaggccgtgtacctaaatgtacttttgctccatcgcgatgacttagtaaagcacatctaaaacttttagcgttattacgtaaaaaatcttgccagctttccccttctaaagggcaaaagtgagtatggtgcctatctaacatctcaatggctaaggcgtcgagcaaagcccgcttattttttacatgccaatacaatgtaggctgctctacacctagcttctgggcgagtttacgggttgttaaaccttcgattccgacctcattaagcagctctaatgcgctgttaatcactttacttttatctaatctggacatattcaccaccctgaattgactctcttccgggcgctatcatgccataccgcgaaaggttttgcgccattcgatggcgcgccgccattgcttgtgcaatgtacatcagagattttgagacacaaccaattattgaaggcctccctaacggggggcctttttttgtttctggtcccccgcttaacgatcgttggctgttttcagcaggacgcactgacctccctatcagtgatagagattgacatccctatcagtgatagagatactgagcacagctgtcaccggatgtgctttccggtctgatgagtccgtgaggacgaaacagcctctacaaataattttgtttaaatcacacgggtaaggaggtatttaaatgaaaacactgtcccaagcacagtcgaagacgagtagccagcagttttctttcaccggtaattctagcgctaacgtgattatcggcaaccagaaactaactatcaacgacgtcgcccgcgttgctcggaacgggaccttagtaagcctgactaacaacactgatatacttcaaggcattcaggcgtcctgtgattatatcaataacgcagttgagtctggtgaaccaatttacggtgtgacctcaggcttcggcggtatggcgaacgttgctatcagccgtgaacaggcctccgaactgcaaaagaatttggtatggtcgcataaaactggtgctgggaacaaactccctttggcggacgtacgtgcagcaatgctgctgcgcgccaactcgcatatgcgtggcgcgtccggtatccgtctggagctgatcaaacgtatggaaatcttcttgaacgctggtgttactccgtacgtttatgaatttggatctatcggcgcttctggagatctggtcccgctgagctacattacgggttccctgattggccttgacccgagcttcaaggtggatttcaacggcaaagaaatggacgccccgaccgcgttacgccagttaaatctgtctcccctgacacttctgcctaaagaagccattgctatgctcaatgggacctcagtcatgactggcatcgcagctaactgcgtatacgacacccagatcctgactgcgattgcaatgggtgttcacgctctggatatccaggccctgaacggcaccaaccagtctttccacccgtttatccataactctaagccgcacccaggtcagctgtgggcggctgatcagatgatatcattgctggctaactcgcaactggtacgggacgagctggacggcaaacatgattaccgcgaccacgagctgatccaggatcgttatagcctgcgttgccttccgcagtacctgggtccgattgtggacggtatctcacagatagcaaaacaaatcgaaattgaaattaactccgttactgataaccctctgattgacgtcgataaccaggcgtcgtaccacggcggaaatttcctgggtcagtatgttggcatgggtatggaccaccttcgctactatatcggcctgctggcgaaacacctggatgtgcagattgcgctgctagctagtcccgaatttagcaacggactgccgccatctttattgggcaaccgtgaacgtaaggttaacatgggtctgaaaggtttacaaatctgtggcaattccatcatgccgctgctgacgttctacggcaatagcatcgccgaccgctttccgacccatgcagagcaattcaaccagaatatcaactctcagggctacacctccgcaacgctggcgcgacgtagtgttgatatcttccaaaactacgttgcgattgccctgatgtttggcgtccaggctgtagacctgaggacttataaaaagactggccattacgatgcgcgtgcttgcctctctccggctaccgaacgcctgtattccgccgtgcgtcacgtagttggtcagaaacctacttcagatcgcccatacatctggaacgataacgagcagggtctggatgaacacatcgctcgcatctccgctgacattgccgctggcggagtaattgttcaagctgtacaggatatcctgccgtgcctgcactaaccggcttatcggtcagtttcacctgatttacgtaaaaacccgcttcggcgggtttttgcttttggaggggcagaaagatgaatgactgtccacgacgctatacccaaaagaaa

SEQ ID NO: 304 - DNA, 5122 bp, synthetic construct
  source 1..5122: mol_type = other DNA
aggctaggtggaggctcagtgatgataagtctgcgatggtggatgcatgtgtcatggtcatagctgtttcctgtgtgaaattgttatccgctcagagggcacaatcctattccgcgctatccgacaatctccaagacattaggtggagttcagttcggcgagcggaaatggcttacgaacggggcggagatttcctggaagatgccaggaagatacttaacagggaagtgagagggccgcggcaaagccgtttttccataggctccgcccccctgacaagcatcacgaaatctgacgctcaaatcagtggtggcgaaacccgacaggactataaagataccaggcgtttccccctggcggctccctcgtgcgctctcctgttcctgcctttcggtttaccggtgtcattccgctgttatggccgcgtttgtctcattccacgcctgacactcagttccgggtaggcagttcgctccaagctggactgtatgcacgaaccccccgttcagtccgaccgctgcgccttatccggtaactatcgtcttgagtccaacccggaaagacatgcaaaagcaccactggcagcagccactggtaattgatttagaggagttagtcttgaagtcatgcgccggttaaggctaaactgaaaggacaagttttggtgactgcgctcctccaagccagttacctcggttcaaagagttggtagctcagagaaccttcgaaaaaccgccctgcaaggcggttttttcgttttcagagcaagagattacgcgcagaccaaaacgatctcaagaagatcatcttattaagtctgacgctctattcaacaaagccgccgtccatgggtagggggcttcaaatcgtcctcgtgataccaattcggagcctgcttttttgtacaaacttgttgataatggcaattcaaggatcttcacctagatccttttaaattaaaaatgaagttttaaatcaatctaaagtatatatgagtaaacttggtctgacagttaccaatgcttaatcagtgaggcacctatctcagcgatctgtctatttcgttcatccatagttgcctgactccccgtcgtgtagataactacgatacgggagggcttaccatctggccccagtgctgcaatgataccgcgagagccacgctcaccggctccagatttatcagcaataaaccagccagccggaagggccgagcgcagaagtggtcctgcaactttatccgcctccatccagtctattaattgttgccgggaagctagagtaagtagttcgccagttaatagtttgcgcaacgttgttgccattgctacaggcatcgtggtgtcacgctcgtcgtttggtatggcttcattcagctccggttcccaacgatcaaggcgagttacatgatcccccatgttgtgcaaaaaagcggttagctccttcggtcctccgatcgttgtcagaagtaagttggccgcagtgttatcactcatggttatggcagcactgcataattctcttactgtcatgccatccgtaagatgcttttctgtgactggtgagtactcaaccaagtcattctgagaatagtgtatgcggcgaccgagttgctcttgcccggcgtcaatacgggataataccgcgccacatagcagaactttaaaagtgctcatcattggaaaacgttcttcggggcgaaaactctcaaggatcttaccgctgttgagatccagttcgatgtaacccactcgtgcacccaactgatcttcagcatcttttactttcaccagcgtttctgggtgagcaaaaacaggaaggcaaaatgccgcaaaaaagggaataagggcgacacggaaatgttgaatactcatactcttcctttttcaatattattgaagcatttatcagggttattgtctcatgagcggatacatatttgaatgtatttagaaaaataaacaaataggggttccgcgcacatttccccgaaaagtgccagatacctgaaacaaaacccatcgtacggccaaggaagtctccaataactgtgatccaccacaagcgccagggttttcccagtcacgacgttgtaaaacgacggccagtcatgcataatccgcacgcatctggaataaggaagtgccattccgcctgacctttgcctatgaggaccaaaacgaaaaaacaccctttcgggtgtcttttctggaatttggtaccgagaggctccatgattcagtatgacttgcctttggtcgaaaaaaaaagcccgcactgtcaggtgcgggcttttttctgtgtttccttattaggacccactttcacatttaagttgtttttctaatccgcatatgatcaattcaaggccgaataagaaggctggctctgcaccttggtgatcaaataattcgatagcttgtcgtaataatggcggcatactatcagtagtaggtgtttccctttcttctttagcgacttgatgctcttgatcttccaatacgcaacctaaagtaaaatgccccacagcgctgagtgcatataatgcattctctagtgaaaaaccttgttggcataaaaaggctaattgattttcgagagtttcatactgtttttctgtaggccgtgtacctaaatgtacttttgctccatcgcgatgacttagtaaagcacatctaaaacttttagcgttattacgtaaaaaatcttgccagctttccccttctaaagggcaaaagtgagtatggtgcctatctaacatctcaatggctaaggcgtcgagcaaagcccgcttattttttacatgccaatacaatgtaggctgctctacacctagcttctgggcgagtttacgggttgttaaaccttcgattccgacctcattaagcagctctaatgcgctgttaatcactttacttttatctaatctggacatattcaccaccctgaattgactctcttccgggcgctatcatgccataccgcgaaaggttttgcgccattcgatggcgcgccgccattgcttgtgcaatgtacatcagagattttgagacacaaccaattattgaaggcctccctaacggggggcctttttttgtttctggtcccccgcttaacgatcgttggctgttttcagcaggacgcactgacctccctatcagtgatagagattgacatccctatcagtgatagagatactgagcacagctgtcaccggatgtgctttccggtctgatgagtccgtgaggacgaaacagcctctacaaataattttgtttaaatcacacgggtaaggaggtatttaaatgaaaacactgtcccaagcacagtcgaagacgagtagccagcagttttctttcaccggtaattctagcgctaacgtgattatcggcaaccagaaactaactatcaacgacgtcgcccgcgttgctcggaacgggaccttagtaagcctgactaacaacactgatatacttcaaggcattcaggcgtcctgtgattatatcaataacgcagttgagtctggtgaaccaatttacggtgtgacctcaggcttcggcggtatggcgaacgttgctatcagccgtgaacaggcctccgaactgcaaaagaatgcggtatggtatacgaaaactggtgctgggaacaaactccctttggcggacgtacgtgcagcaatgctgctgcgcgccaactcgcatatgcgtggcgcgtccggtatccgtctggagctgatcaaacgtatggaaatcttcttgaacgctggtgttactccgtacgtttatgaatttggatctatcggcgcttctggagatctggtcccgctgagctacattacgggttccctgattggccttgacccgagcttcaaggtggatttcaacggcaaagaaatggacgccccgaccgcgttacgccagttaaatctgtctcccctgacacttctgcctaaagaatcaattgctatgctcaatgggacctcagtcatgactggcatcgcagctaactgcgtatacgacacccagatcctgactgcgattgcaatgggtgttcacgctctggatatccaggccctgaacggcaccaaccagtctttccacccgtttatccataactctaagccgcacccaggtcagctgtgggcggctgatcagatgatatcattgctggctaactcgcaactggtacgggacgagctggacggcaaacatgattaccgcgaccacgagctgatccaggatcgttatagcctgcgttgccttccgcagtacctgggtccgattgtggacggtatctcacagatagcaaaacaaatcgaaattgaaattaactccgttactgataaccctctgattgacgtcgataaccaggcgtcgtaccacggcggaaatttcctgggtcagtatgttggcatgggtatggaccaccttcgctactatatcggcctgctggcgaaacacctggatgtgcagattgcgctgctagctagtcccgaatttagcaacggactgccgccatctttattgggcaaccgtgaacgtaaggttaacatgggtctgaaaggtttacaaatctgtggcaattccatcatgccgctgctgacgttctacggcaatagcatcgccgaccgctttccgacccatgcagagcaattcaaccagaatatcaactctcagggctacacctccgcaacgctggcgcgacgtagtgttgatatcttccaaaactacgttgcgattgccctgatgtttggcgtccaggctgtagacctgaggacttataaaaagactggccattacgatgcgcgtgcttgcctctctccggctaccgaacgcctgtattccgccgtgcgtcacgtagttggtcagaaacctacttcagatcgcccatacatctggaacgataacgagcagggtctggatgaacacatcgctcgcatctccgctgacattgccgctggcggagtaattgttcaagctgtacaggatatcctgccgtgcctgcactaaccggcttatcggtcagtttcacctgatttacgtaaaaacccgcttcggcgggtttttgcttttggaggggcagaaagatgaatgactgtccacgacgctatacccaaaagaaa

SEQ ID NO: 305 - DNA, 5122 bp, synthetic construct
  source 1..5122: mol_type = other DNA
aggctaggtggaggctcagtgatgataagtctgcgatggtggatgcatgtgtcatggtcatagctgtttcctgtgtgaaattgttatccgctcagagggcacaatcctattccgcgctatccgacaatctccaagacattaggtggagttcagttcggcgagcggaaatggcttacgaacggggcggagatttcctggaagatgccaggaagatacttaacagggaagtgagagggccgcggcaaagccgtttttccataggctccgcccccctgacaagcatcacgaaatctgacgctcaaatcagtggtggcgaaacccgacaggactataaagataccaggcgtttccccctggcggctccctcgtgcgctctcctgttcctgcctttcggtttaccggtgtcattccgctgttatggccgcgtttgtctcattccacgcctgacactcagttccgggtaggcagttcgctccaagctggactgtatgcacgaaccccccgttcagtccgaccgctgcgccttatccggtaactatcgtcttgagtccaacccggaaagacatgcaaaagcaccactggcagcagccactggtaattgatttagaggagttagtcttgaagtcatgcgccggttaaggctaaactgaaaggacaagttttggtgactgcgctcctccaagccagttacctcggttcaaagagttggtagctcagagaaccttcgaaaaaccgccctgcaaggcggttttttcgttttcagagcaagagattacgcgcagaccaaaacgatctcaagaagatcatcttattaagtctgacgctctattcaacaaagccgccgtccatgggtagggggcttcaaatcgtcctcgtgataccaattcggagcctgcttttttgtacaaacttgttgataatggcaattcaaggatcttcacctagatccttttaaattaaaaatgaagttttaaatcaatctaaagtatatatgagtaaacttggtctgacagttaccaatgcttaatcagtgaggcacctatctcagcgatctgtctatttcgttcatccatagttgcctgactccccgtcgtgtagataactacgatacgggagggcttaccatctggccccagtgctgcaatgataccgcgagagccacgctcaccggctccagatttatcagcaataaaccagccagccggaagggccgagcgcagaagtggtcctgcaactttatccgcctccatccagtctattaattgttgccgggaagctagagtaagtagttcgccagttaatagtttgcgcaacgttgttgccattgctacaggcatcgtggtgtcacgctcgtcgtttggtatggcttcattcagctccggttcccaacgatcaaggcgagttacatgatcccccatgttgtgcaaaaaagcggttagctccttcggtcctccgatcgttgtcagaagtaagttggccgcagtgttatcactcatggttatggcagcactgcataattctcttactgtcatgccatccgtaagatgcttttctgtgactggtgagtactcaaccaagtcattctgagaatagtgtatgcggcgaccgagttgctcttgcccggcgtcaatacgggataataccgcgccacatagcagaactttaaaagtgctcatcattggaaaacgttcttcggggcgaaaactctcaaggatcttaccgctgttgagatccagttcgatgtaacccactcgtgcacccaactgatcttcagcatcttttactttcaccagcgtttctgggtgagcaaaaacaggaaggcaaaatgccgcaaaaaagggaataagggcgacacggaaatgttgaatactcatactcttcctttttcaatattattgaagcatttatcagggttattgtctcatgagcggatacatatttgaatgtatttagaaaaataaacaaataggggttccgcgcacatttccccgaaaagtgccagatacctgaaacaaaacccatcgtacggccaaggaagtctccaataactgtgatccaccacaagcgccagggttttcccagtcacgacgttgtaaaacgacggccagtcatgcataatccgcacgcatctggaataaggaagtgccattccgcctgacctttgcctatgaggaccaaaacgaaaaaacaccctttcgggtgtcttttctggaatttggtaccgagaggctccatgattcagtatgacttgcctttggtcgaaaaaaaaagcccgcactgtcaggtgcgggcttttttctgtgtttccttattaggacccactttcacatttaagttgtttttctaatccgcatatgatcaattcaaggccgaataagaaggctggctctgcaccttggtgatcaaataattcgatagcttgtcgtaataatggcggcatactatcagtagtaggtgtttccctttcttctttagcgacttgatgctcttgatcttccaatacgcaacctaaagtaaaatgccccacagcgctgagtgcatataatgcattctctagtgaaaaaccttgttggcataaaaaggctaattgattttcgagagtttcatactgtttttctgtaggccgtgtacctaaatgtacttttgctccatcgcgatgacttagtaaagcacatctaaaacttttagcgttattacgtaaaaaatcttgccagctttccccttctaaagggcaaaagtgagtatggtgcctatctaacatctcaatggctaaggcgtcgagcaaagcccgcttattttttacatgccaatacaatgtaggctgctctacacctagcttctgggcgagtttacgggttgttaaaccttcgattccgacctcattaagcagctctaatgcgctgttaatcactttacttttatctaatctggacatattcaccaccctgaattgactctcttccgggcgctatcatgccataccgcgaaaggttttgcgccattcgatggcgcgccgccattgcttgtgcaatgtacatcagagattttgagacacaaccaattattgaaggcctccctaacggggggcctttttttgtttctggtcccccgcttaacgatcgttggctgttttcagcaggacgcactgacctccctatcagtgatagagattgacatccctatcagtgatagagatactgagcacagctgtcaccggatgtgctttccggtctgatgagtccgtgaggacgaaacagcctctacaaataattttgtttaaatcacacgggtaaggaggtatttaaatgaaaacactgtcccaagcacagtcgaagacgagtagccagcagttttctttcaccggtaattctagcgctaacgtgattatcggcaaccagaaactaactatcaacgacgtcgcccgcgttgctcggaacgggaccttagtaagcctgactaacaacactgatatacttcaaggcattcaggcgtcctgtgattatatcaataacgcagttgagtctggtgaaccaatttacggtgtgacctcaggcttcggcggtatggcgaacgttgctatcagccgtgaacaggcctccgaactgcaagagaatatggtatggcatctgaaaactggtgctgggaacaaactccctttggcggacgtacgtgcagcaatgctgctgcgcgccaactcgcatatgcgtggcgcgtccggtatccgtctggagctgatcaaacgtatggaaatcttcttgaacgctggtgttactccgtacgtttatgaatttggatctatcggcgcttctggagatctggtcccgctgagctacattacgggttccctgattggccttgacccgagcttcaaggtggatttcaacggcaaagaaatggacgccccgaccgcgttacgccagttaaatctgtctcccctgacacttctgcctaaagaatcgctagctatggtcaatgggacctcagtcatgactggcatcgcagctaactgcgtatacgacacccagatcctgactgcgattgcaatgggtgttcacgctctggatatccaggccctgaacggcaccaaccagtctttccacccgtttatccataactctaagccgcacccaggtcagctgtgggcggctgatcagatgatatcattgctggctaactcgcaactggtacgggacgagctggacggcaaacatgattaccgcgaccacgagctgatccaggatcgttatagcctgcgttgccttccgcagtacctgggtccgattgtggacggtatctcacagatagcaaaacaaatcgaaattgaaattaactccgttactgataaccctctgattgacgtcgataaccaggcgtcgtaccacggcggaaatttcctgggtcagtatgttggcatgggtatggaccaccttcgctactatatcggcctgctggcgaaacacctggatgtgcagattgcgctgctagctagtcccgaatttagcaacggactgccgccatctttattgggcaaccgtgaacgtaaggttaacatgggtctgaaaggtttacaaatctgtggcaattccatcatgccgctgctgacgttctacggcaatagcatcgccgaccgctttccgacccatgcagagcaattcaaccagaatatcaactctcagggctacacctccgcaacgctggcgcgacgtagtgttgatatcttccaaaactacgttgcgattgccctgatgtttggcgtccaggctgtagacctgaggacttataaaaagactggccattacgatgcgcgtgcttgcctctctccggctaccgaacgcctgtattccgccgtgcgtcacgtagttggtcagaaacctacttcagatcgcccatacatctggaacgataacgagcagggtctggatgaacacatcgctcgcatctccgctgacattgccgctggcggagtaattgttcaagctgtacaggatatcctgccgtgcctgcactaaccggcttatcggtcagtttcacctgatttacgtaaaaacccgcttcggcgggtttttgcttttggaggggcagaaagatgaatgactgtccacgacgctatacccaaaagaaa

SEQ ID NO: 306 - DNA, 5122 bp, synthetic construct
  source 1..5122: mol_type = other DNA
aggctaggtggaggctcagtgatgataagtctgcgatggtggatgcatgtgtcatggtcatagctgtttcctgtgtgaaattgttatccgctcagagggcacaatcctattccgcgctatccgacaatctccaagacattaggtggagttcagttcggcgagcggaaatggcttacgaacggggcggagatttcctggaagatgccaggaagatacttaacagggaagtgagagggccgcggcaaagccgtttttccataggctccgcccccctgacaagcatcacgaaatctgacgctcaaatcagtggtggcgaaacccgacaggactataaagataccaggcgtttccccctggcggctccctcgtgcgctctcctgttcctgcctttcggtttaccggtgtcattccgctgttatggccgcgtttgtctcattccacgcctgacactcagttccgggtaggcagttcgctccaagctggactgtatgcacgaaccccccgttcagtccgaccgctgcgccttatccggtaactatcgtcttgagtccaacccggaaagacatgcaaaagcaccactggcagcagccactggtaattgatttagaggagttagtcttgaagtcatgcgccggttaaggctaaactgaaaggacaagttttggtgactgcgctcctccaagccagttacctcggttcaaagagttggtagctcagagaaccttcgaaaaaccgccctgcaaggcggttttttcgttttcagagcaagagattacgcgcagaccaaaacgatctcaagaagatcatcttattaagtctgacgctctattcaacaaagccgccgtccatgggtagggggcttcaaatcgtcctcgtgataccaattcggagcctgcttttttgtacaaacttgttgataatggcaattcaaggatcttcacctagatccttttaaattaaaaatgaagttttaaatcaatctaaagtatatatgagtaaacttggtctgacagttaccaatgcttaatcagtgaggcacctatctcagcgatctgtctatttcgttcatccatagttgcctgactccccgtcgtgtagataactacgatacgggagggcttaccatctggccccagtgctgcaatgataccgcgagagccacgctcaccggctccagatttatcagcaataaaccagccagccggaagggccgagcgcagaagtggtcctgcaactttatccgcctccatccagtctattaattgttgccgggaagctagagtaagtagttcgccagttaatagtttgcgcaacgttgttgccattgctacaggcatcgtggtgtcacgctcgtcgtttggtatggcttcattcagctccggttcccaacgatcaaggcgagttacatgatcccccatgttgtgcaaaaaagcggttagctccttcggtcctccgatcgttgtcagaagtaagttggccgcagtgttatcactcatggttatggcagcactgcataattctcttactgtcatgccatccgtaagatgcttttctgtgactggtgagtactcaaccaagtcattctgagaatagtgtatgcggcgaccgagttgctcttgcccggcgtcaatacgggataataccgcgccacatagcagaactttaaaagtgctcatcattggaaaacgttcttcggggcgaaaactctcaaggatcttaccgctgttgagatccagttcgatgtaacccactcgtgcacccaactgatcttcagcatcttttactttcaccagcgtttctgggtgagcaaaaacaggaaggcaaaatgccgcaaaaaagggaataagggcgacacggaaatgttgaatactcatactcttcctttttcaatattattgaagcatttatcagggttattgtctcatgagcggatacatatttgaatgtatttagaaaaataaacaaataggggttccgcgcacatttccccgaaaagtgccagatacctgaaacaaaacccatcgtacggccaaggaagtctccaataactgtgatccaccacaagcgccagggttttcccagtcacgacgttgtaaaacgacggccagtcatgcataatccgcacgcatctggaataaggaagtgccattccgcctgacctttgcctatgaggaccaaaacgaaaaaacaccctttcgggtgtcttttctggaatttggtaccgagaggctccatgattcagtatgacttgcctttggtcgaaaaaaaaagcccgcactgtcaggtgcgggcttttttctgtgtttccttattaggacccactttcacatttaagttgtttttctaatccgcatatgatcaattcaaggccgaataagaaggctggctctgcaccttggtgatcaaataattcgatagcttgtcgtaataatggcggcatactatcagtagtaggtgtttccctttcttctttagcgacttgatgctcttgatcttccaatacgcaacctaaagtaaaatgccccacagcgctgagtgcatataatgcattctctagtgaaaaaccttgttggcataaaaaggctaattgattttcgagagtttcatactgtttttctgtaggccgtgtacctaaatgtacttttgctccatcgcgatgacttagtaaagcacatctaaaacttttagcgttattacgtaaaaaatcttgccagctttccccttctaaagggcaaaagtgagtatggtgcctatctaacatctcaatggctaaggcgtcgagcaaagcccgcttattttttacatgccaatacaatgtaggctgctctacacctagcttctgggcgagtttacgggttgttaaaccttcgattccgacctcattaagcagctctaatgcgctgttaatcactttacttttatctaatctggacatattcaccaccctgaattgactctcttccgggcgctatcatgccataccgcgaaaggttttgcgccattcgatggcgcgccgccattgcttgtgcaatgtacatcagagattttgagacacaaccaattattgaaggcctccctaacggggggcctttttttgtttctggtcccccgcttaacgatcgttggctgttttcagcaggacgcactgacctccctatcagtgatagagattgacatccctatcagtgatagagatactgagcacagctgtcaccggatgtgctttccggtctgatgagtccgtgaggacgaaacagcctctacaaataattttgtttaaatcacacgggtaaggaggtatttaaatgaaaacactgtcccaagcacagtcgaagacgagtagccagcagttttctttcaccggtaattctagcgctaacgtgattatcggcaaccagaaactaactatcaacgacgtcgcccgcgttgctcggaacgggaccttagtaagcctgactaacaacactgatatacttcaaggcattcaggcgtcctgtgattatatcaataacgcagttgagtctggtgaaccaatttacggtgtgacctcaggcttcggcggtatggcgaacgttgctatcagccgtgaacaggcctccgaactgcaatcgaatgtggtatggtcgcacaaaactggtgctgggaacaaactccctttggcggacgtacgtgcagcaatgctgctgcgcgccaactcgcatatgcgtggcgcgtccggtatccgtctggagctgatcaaacgtatggaaatcttcttgaacgctggtgttactccgtacgtttatgaatttggatctatcggcgcttctggagatctggtcccgctgagctacattacgggttccctgattggccttgacccgagcttcaaggtggatttcaacggcaaagaaatggacgccccgaccgcgttacgccagttaaatctgtctcccctgacacttctgcctaaagaaggtatagctatgattaatgggacctcagtcatgactggcatcgcagctaactgcgtatacgacacccagatcctgactgcgattgcaatgggtgttcacgctctggatatccaggccctgaacggcaccaaccagtctttccacccgtttatccataactctaagccgcacccaggtcagctgtgggcggctgatcagatgatatcattgctggctaactcgcaactggtacgggacgagctggacggcaaacatgattaccgcgaccacgagctgatccaggatcgttatagcctgcgttgccttccgcagtacctgggtccgattgtggacggtatctcacagatagcaaaacaaatcgaaattgaaattaactccgttactgataaccctctgattgacgtcgataaccaggcgtcgtaccacggcggaaatttcctgggtcagtatgttggcatgggtatggaccaccttcgctactatatcggcctgctggcgaaacacctggatgtgcagattgcgctgctagctagtcccgaatttagcaacggactgccgccatctttattgggcaaccgtgaacgtaaggttaacatgggtctgaaaggtttacaaatctgtggcaattccatcatgccgctgctgacgttctacggcaatagcatcgccgaccgctttccgacccatgcagagcaattcaaccagaatatcaactctcagggctacacctccgcaacgctggcgcgacgtagtgttgatatcttccaaaactacgttgcgattgccctgatgtttggcgtccaggctgtagacctgaggacttataaaaagactggccattacgatgcgcgtgcttgcctctctccggctaccgaacgcctgtattccgccgtgcgtcacgtagttggtcagaaacctacttcagatcgcccatacatctggaacgataacgagcagggtctggatgaacacatcgctcgcatctccgctgacattgccgctggcggagtaattgttcaagctgtacaggatatcctgccgtgcctgcactaaccggcttatcggtcagtttcacctgatttacgtaaaaacccgcttcggcgggtttttgcttttggaggggcagaaagatgaatgactgtccacgacgctatacccaaaagaaa

SEQ ID NO: 307 - DNA, 5122 bp, synthetic construct
  source 1..5122: mol_type = other DNA
aggctaggtggaggctcagtgatgataagtctgcgatggtggatgcatgtgtcatggtcatagctgtttcctgtgtgaaattgttatccgctcagagggcacaatcctattccgcgctatccgacaatctccaagacattaggtggagttcagttcggcgagcggaaatggcttacgaacggggcggagatttcctggaagatgccaggaagatacttaacagggaagtgagagggccgcggcaaagccgtttttccataggctccgcccccctgacaagcatcacgaaatctgacgctcaaatcagtggtggcgaaacccgacaggactataaagataccaggcgtttccccctggcggctccctcgtgcgctctcctgttcctgcctttcggtttaccggtgtcattccgctgttatggccgcgtttgtctcattccacgcctgacactcagttccgggtaggcagttcgctccaagctggactgtatgcacgaaccccccgttcagtccgaccgctgcgccttatccggtaactatcgtcttgagtccaacccggaaagacatgcaaaagcaccactggcagcagccactggtaattgatttagaggagttagtcttgaagtcatgcgccggttaaggctaaactgaaaggacaagttttggtgactgcgctcctccaagccagttacctcggttcaaagagttggtagctcagagaaccttcgaaaaaccgccctgcaaggcggttttttcgttttcagagcaagagattacgcgcagaccaaaacgatctcaagaagatcatcttattaagtctgacgctctattcaacaaagccgccgtccatgggtagggggcttcaaatcgtcctcgtgataccaattcggagcctgcttttttgtacaaacttgttgataatggcaattcaaggatcttcacctagatccttttaaattaaaaatgaagttttaaatcaatctaaagtatatatgagtaaacttggtctgacagttaccaatgcttaatcagtgaggcacctatctcagcgatctgtctatttcgttcatccatagttgcctgactccccgtcgtgtagataactacgatacgggagggcttaccatctggccccagtgctgcaatgataccgcgagagccacgctcaccggctccagatttatcagcaataaaccagccagccggaagggccgagcgcagaagtggtcctgcaactttatccgcctccatccagtctattaattgttgccgggaagctagagtaagtagttcgccagttaatagtttgcgcaacgttgttgccattgctacaggcatcgtggtgtcacgctcgtcgtttggtatggcttcattcagctccggttcccaacgatcaaggcgagttacatgatcccccatgttgtgcaaaaaagcggttagctccttcggtcctccgatcgttgtcagaagtaagttggccgcagtgttatcactcatggttatggcagcactgcataattctcttactgtcatgccatccgtaagatgcttttctgtgactggtgagtactcaaccaagtcattctgagaatagtgtatgcggcgaccgagttgctcttgcccggcgtcaatacgggataataccgcgccacatagcagaactttaaaagtgctcatcattggaaaacgttcttcggggcgaaaactctcaaggatcttaccgctgttgagatccagttcgatgtaacccactcgtgcacccaactgatcttcagcatcttttactttcaccagcgtttctgggtgagcaaaaacaggaaggcaaaatgccgcaaaaaagggaataagggcgacacggaaatgttgaatactcatactcttcctttttcaatattattgaagcatttatcagggttattgtctcatgagcggatacatatttgaatgtatttagaaaaataaacaaataggggttccgcgcacatttccccgaaaagtgccagatacctgaaacaaaacccatcgtacggccaaggaagtctccaataactgtgatccaccacaagcgccagggttttcccagtcacgacgttgtaaaacgacggccagtcatgcataatccgcacgcatctggaataaggaagtgccattccgcctgacctttgcctatgaggaccaaaacgaaaaaacaccctttcgggtgtcttttctggaatttggtaccgagaggctccatgattcagtatgacttgcctttggtcgaaaaaaaaagcccgcactgtcaggtgcgggcttttttctgtgtttccttattaggacccactttcacatttaagttgtttttctaatccgcatatgatcaattcaaggccgaataagaaggctggctctgcaccttggtgatcaaataattcgatagcttgtcgtaataatggcggcatactatcagtagtaggtgtttccctttcttctttagcgacttgatgctcttgatcttccaatacgcaacctaaagtaaaatgccccacagcgctgagtgcatataatgcattctctagtgaaaaaccttgttggcataaaaaggctaattgattttcgagagtttcatactgtttttctgtaggccgtgtacctaaatgtacttttgctccatcgcgatgacttagtaaagcacatctaaaacttttagcgttattacgtaaaaaatcttgccagctttccccttctaaagggcaaaagtgagtatggtgcctatctaacatctcaatggctaaggcgtcgagcaaagcccgcttattttttacatgccaatacaatgtaggctgctctacacctagcttctgggcgagtttacgggttgttaaaccttcgattccgacctcattaagcagctctaatgcgctgttaatcactttacttttatctaatctggacatattcaccaccctgaattgactctcttccgggcgctatcatgccataccgcgaaaggttttgcgccattcgatggcgcgccgccattgcttgtgcaatgtacatcagagattttgagacacaaccaattattgaaggcctccctaacggggggcctttttttgtttctggtcccccgcttaacgatcgttggctgttttcagcaggacgcactgacctccctatcagtgatagagattgacatccctatcagtgatagagatactgagcacagctgtcaccggatgtgctttccggtctgatgagtccgtgaggacgaaacagcctctacaaataattttgtttaaatcacacgggtaaggaggtatttaaatgaaaacactgtcccaagcacagtcgaagacgagtagccagcagttttctttcaccggtaattctagcgctaacgtgattatcggcaaccagaaactaactatcaacgacgtcgcccgcgttgctcggaacgggaccttagtaagcctgactaacaacactgatatacttcaaggcattcaggcgtcctgtgattatatcaataacgcagttgagtctggtgaaccaatttacggtgtgacctcaggcttcggcggtatggcgaacgttgctatcagccgtgaacaggcctccgaactgcaagagaatatggtatggtttatgaaaactggtgctgggaacaaactccctttggcggacgtacgtgcagcaatgctgctgcgcgccaactcgcatatgcgtggcgcgtccggtatccgtctggagctgatcaaacgtatggaaatcttcttgaacgctggtgttactccgtacgtttatgaatttggatctatcggcgcttctggagatctggtcccgctgagctacattacgggttccctgattggccttgacccgagcttcaaggtggatttcaacggcaaagaaatggacgccccgaccgcgttacgccagttaaatctgtctcccctgacacttctgcctaaagaagccattgctatgacgaatgggacctcagtcatgactggcatcgcagctaactgcgtatacgacacccagatcctgactgcgattgcaatgggtgttcacgctctggatatccaggccctgaacggcaccaaccagtctttccacccgtttatccataactctaagccgcacccaggtcagctgtgggcggctgatcagatgatatcattgctggctaactcgcaactggtacgggacgagctggacggcaaacatgattaccgcgaccacgagctgatccaggatcgttatagcctgcgttgccttccgcagtacctgggtccgattgtggacggtatctcacagatagcaaaacaaatcgaaattgaaattaactccgttactgataaccctctgattgacgtcgataaccaggcgtcgtaccacggcggaaatttcctgggtcagtatgttggcatgggtatggaccaccttcgctactatatcggcctgctggcgaaacacctggatgtgcagattgcgctgctagctagtcccgaatttagcaacggactgccgccatctttattgggcaaccgtgaacgtaaggttaacatgggtctgaaaggtttacaaatctgtggcaattccatcatgccgctgctgacgttctacggcaatagcatcgccgaccgctttccgacccatgcagagcaattcaaccagaatatcaactctcagggctacacctccgcaacgctggcgcgacgtagtgttgatatcttccaaaactacgttgcgattgccctgatgtttggcgtccaggctgtagacctgaggacttataaaaagactggccattacgatgcgcgtgcttgcctctctccggctaccgaacgcctgtattccgccgtgcgtcacgtagttggtcagaaacctacttcagatcgcccatacatctggaacgataacgagcagggtctggatgaacacatcgctcgcatctccgctgacattgccgctggcggagtaattgttcaagctgtacaggatatcctgccgtgcctgcactaaccggcttatcggtcagtttcacctgatttacgtaaaaacccgcttcggcgggtttttgcttttggaggggcagaaagatgaatgactgtccacgacgctatacccaaaagaaa

SEQ ID NO: 308 - DNA, 5122 bp, synthetic construct
  source 1..5122: mol_type = other DNA
aggctaggtggaggctcagtgatgataagtctgcgatggtggatgcatgtgtcatggtcatagctgtttcctgtgtgaaattgttatccgctcagagggcacaatcctattccgcgctatccgacaatctccaagacattaggtggagttcagttcggcgagcggaaatggcttacgaacggggcggagatttcctggaagatgccaggaagatacttaacagggaagtgagagggccgcggcaaagccgtttttccataggctccgcccccctgacaagcatcacgaaatctgacgctcaaatcagtggtggcgaaacccgacaggactataaagataccaggcgtttccccctggcggctccctcgtgcgctctcctgttcctgcctttcggtttaccggtgtcattccgctgttatggccgcgtttgtctcattccacgcctgacactcagttccgggtaggcagttcgctccaagctggactgtatgcacgaaccccccgttcagtccgaccgctgcgccttatccggtaactatcgtcttgagtccaacccggaaagacatgcaaaagcaccactggcagcagccactggtaattgatttagaggagttagtcttgaagtcatgcgccggttaaggctaaactgaaaggacaagttttggtgactgcgctcctccaagccagttacctcggttcaaagagttggtagctcagagaaccttcgaaaaaccgccctgcaaggcggttttttcgttttcagagcaagagattacgcgcagaccaaaacgatctcaagaagatcatcttattaagtctgacgctctattcaacaaagccgccgtccatgggtagggggcttcaaatcgtcctcgtgataccaattcggagcctgcttttttgtacaaacttgttgataatggcaattcaaggatcttcacctagatccttttaaattaaaaatgaagttttaaatcaatctaaagtatatatgagtaaacttggtctgacagttaccaatgcttaatcagtgaggcacctatctcagcgatctgtctatttcgttcatccatagttgcctgactccccgtcgtgtagataactacgatacgggagggcttaccatctggccccagtgctgcaatgataccgcgagagccacgctcaccggctccagatttatcagcaataaaccagccagccggaagggccgagcgcagaagtggtcctgcaactttatccgcctccatccagtctattaattgttgccgggaagctagagtaagtagttcgccagttaatagtttgcgcaacgttgttgccattgctacaggcatcgtggtgtcacgctcgtcgtttggtatggcttcattcagctccggttcccaacgatcaaggcgagttacatgatcccccatgttgtgcaaaaaagcggttagctccttcggtcctccgatcgttgtcagaagtaagttggccgcagtgttatcactcatggttatggcagcactgcataattctcttactgtcatgccatccgtaagatgcttttctgtgactggtgagtactcaaccaagtcattctgagaatagtgtatgcggcgaccgagttgctcttgcccggcgtcaatacgggataataccgcgccacatagcagaactttaaaagtgctcatcattggaaaacgttcttcggggcgaaaactctcaaggatcttaccgctgttgagatccagttcgatgtaacccactcgtgcacccaactgatcttcagcatcttttactttcaccagcgtttctgggtgagcaaaaacaggaaggcaaaatgccgcaaaaaagggaataagggcgacacggaaatgttgaatactcatactcttcctttttcaatattattgaagcatttatcagggttattgtctcatgagcggatacatatttgaatgtatttagaaaaataaacaaataggggttccgcgcacatttccccgaaaagtgccagatacctgaaacaaaacccatcgtacggccaaggaagtctccaataactgtgatccaccacaagcgccagggttttcccagtcacgacgttgtaaaacgacggccagtcatgcataatccgcacgcatctggaataaggaagtgccattccgcctgacctttgcctatgaggaccaaaacgaaaaaacaccctttcgggtgtcttttctggaatttggtaccgagaggctccatgattcagtatgacttgcctttggtcgaaaaaaaaagcccgcactgtcaggtgcgggcttttttctgtgtttccttattaggacccactttcacatttaagttgtttttctaatccgcatatgatcaattcaaggccgaataagaaggctggctctgcaccttggtgatcaaataattcgatagcttgtcgtaataatggcggcatactatcagtagtaggtgtttccctttcttctttagcgacttgatgctcttgatcttccaatacgcaacctaaagtaaaatgccccacagcgctgagtgcatataatgcattctctagtgaaaaaccttgttggcataaaaaggctaattgattttcgagagtttcatactgtttttctgtaggccgtgtacctaaatgtacttttgctccatcgcgatgacttagtaaagcacatctaaaacttttagcgttattacgtaaaaaatcttgccagctttccccttctaaagggcaaaagtgagtatggtgcctatctaacatctcaatggctaaggcgtcgagcaaagcccgcttattttttacatgccaatacaatgtaggctgctctacacctagcttctgggcgagtttacgggttgttaaaccttcgattccgacctcattaagcagctctaatgcgctgttaatcactttacttttatctaatctggacatattcaccaccctgaattgactctcttccgggcgctatcatgccataccgcgaaaggttttgcgccattcgatggcgcgccgccattgcttgtgcaatgtacatcagagattttgagacacaaccaattattgaaggcctccctaacggggggcctttttttgtttctggtcccccgcttaacgatcgttggctgttttcagcaggacgcactgacctccctatcagtgatagagattgacatccctatcagtgatagagatactgagcacagctgtcaccggatgtgctttccggtctgatgagtccgtgaggacgaaacagcctctacaaataattttgtttaaatcacacgggtaaggaggtatttaaatgaaaacactgtcccaagcacagtcgaagacgagtagccagcagttttctttcaccggtaattctagcgctaacgtgattatcggcaaccagaaactaactatcaacgacgtcgcccgcgttgctcggaacgggaccttagtaagcctgactaacaacactgatatacttcaaggcattcaggcgtcctgtgattatatcaataacgcagttgagtctggtgaaccaatttacggtgtgacctcaggcttcggcggtatggcgaacgttgctatcagccgtgaacaggcctccgaactgcaagagaatgtggtatggtatcacaaaactggtgctgggaacaaactccctttggcggacgtacgtgcagcaatgctgctgcgcgccaactcgcatatgcgtggcgcgtccggtatccgtctggagctgatcaaacgtatggaaatcttcttgaacgctggtgttactccgtacgtttatgaatttggatctatcggcgcttctggagatctggtcccgctgagctacattacgggttccctgattggccttgacccgagcttcaaggtggatttcaacggcaaagaaatggacgccccgaccgcgttacgccagttaaatctgtctcccctgacacttctgcctaaagaaagtctagctatgatgaatgggacctcagtcatgactggcatcgcagctaactgcgtatacgacacccagatcctgactgcgattgcaatgggtgttcacgctctggatatccaggccctgaacggcaccaaccagtctttccacccgtttatccataactctaagccgcacccaggtcagctgtgggcggctgatcagatgatatcattgctggctaactcgcaactggtacgggacgagctggacggcaaacatgattaccgcgaccacgagctgatccaggatcgttatagcctgcgttgccttccgcagtacctgggtccgattgtggacggtatctcacagatagcaaaacaaatcgaaattgaaattaactccgttactgataaccctctgattgacgtcgataaccaggcgtcgtaccacggcggaaatttcctgggtcagtatgttggcatgggtatggaccaccttcgctactatatcggcctgctggcgaaacacctggatgtgcagattgcgctgctagctagtcccgaatttagcaacggactgccgccatctttattgggcaaccgtgaacgtaaggttaacatgggtctgaaaggtttacaaatctgtggcaattccatcatgccgctgctgacgttctacggcaatagcatcgccgaccgctttccgacccatgcagagcaattcaaccagaatatcaactctcagggctacacctccgcaacgctggcgcgacgtagtgttgatatcttccaaaactacgttgcgattgccctgatgtttggcgtccaggctgtagacctgaggacttataaaaagactggccattacgatgcgcgtgcttgcctctctccggctaccgaacgcctgtattccgccgtgcgtcacgtagttggtcagaaacctacttcagatcgcccatacatctggaacgataacgagcagggtctggatgaacacatcgctcgcatctccgctgacattgccgctggcggagtaattgttcaagctgtacaggatatcctgccgtgcctgcactaaccggcttatcggtcagtttcacctgatttacgtaaaaacccgcttcggcgggtttttgcttttggaggggcagaaagatgaatgactgtccacgacgctatacccaaaagaaa

SEQ ID NO: 309 - DNA, 5122 bp, synthetic construct
  source 1..5122: mol_type = other DNA
aggctaggtggaggctcagtgatgataagtctgcgatggtggatgcatgtgtcatggtcatagctgtttcctgtgtgaaattgttatccgctcagagggcacaatcctattccgcgctatccgacaatctccaagacattaggtggagttcagttcggcgagcggaaatggcttacgaacggggcggagatttcctggaagatgccaggaagatacttaacagggaagtgagagggccgcggcaaagccgtttttccataggctccgcccccctgacaagcatcacgaaatctgacgctcaaatcagtggtggcgaaacccgacaggactataaagataccaggcgtttccccctggcggctccctcgtgcgctctcctgttcctgcctttcggtttaccggtgtcattccgctgttatggccgcgtttgtctcattccacgcctgacactcagttccgggtaggcagttcgctccaagctggactgtatgcacgaaccccccgttcagtccgaccgctgcgccttatccggtaactatcgtcttgagtccaacccggaaagacatgcaaaagcaccactggcagcagccactggtaattgatttagaggagttagtcttgaagtcatgcgccggttaaggctaaactgaaaggacaagttttggtgactgcgctcctccaagccagttacctcggttcaaagagttggtagctcagagaaccttcgaaaaaccgccctgcaaggcggttttttcgttttcagagcaagagattacgcgcagaccaaaacgatctcaagaagatcatcttattaagtctgacgctctattcaacaaagccgccgtccatgggtagggggcttcaaatcgtcctcgtgataccaattcggagcctgcttttttgtacaaacttgttgataatggcaattcaaggatcttcacctagatccttttaaattaaaaatgaagttttaaatcaatctaaagtatatatgagtaaacttggtctgacagttaccaatgcttaatcagtgaggcacctatctcagcgatctgtctatttcgttcatccatagttgcctgactccccgtcgtgtagataactacgatacgggagggcttaccatctggccccagtgctgcaatgataccgcgagagccacgctcaccggctccagatttatcagcaataaaccagccagccggaagggccgagcgcagaagtggtcctgcaactttatccgcctccatccagtctattaattgttgccgggaagctagagtaagtagttcgccagttaatagtttgcgcaacgttgttgccattgctacaggcatcgtggtgtcacgctcgtcgtttggtatggcttcattcagctccggttcccaacgatcaaggcgagttacatgatcccccatgttgtgcaaaaaagcggttagctccttcggtcctccgatcgttgtcagaagtaagttggccgcagtgttatcactcatggttatggcagcactgcataattctcttactgtcatgccatccgtaagatgcttttctgtgactggtgagtactcaaccaagtcattctgagaatagtgtatgcggcgaccgagttgctcttgcccggcgtcaatacgggataataccgcgccacatagcagaactttaaaagtgctcatcattggaaaacgttcttcggggcgaaaactctcaaggatcttaccgctgttgagatccagttcgatgtaacccactcgtgcacccaactgatcttcagcatcttttactttcaccagcgtttctgggtgagcaaaaacaggaaggcaaaatgccgcaaaaaagggaataagggcgacacggaaatgttgaatactcatactcttcctttttcaatattattgaagcatttatcagggttattgtctcatgagcggatacatatttgaatgtatttagaaaaataaacaaataggggttccgcgcacatttccccgaaaagtgccagatacctgaaacaaaacccatcgtacggccaaggaagtctccaataactgtgatccaccacaagcgccagggttttcccagtcacgacgttgtaaaacgacggccagtcatgcataatccgcacgcatctggaataaggaagtgccattccgcctgacctttgcctatgaggaccaaaacgaaaaaacaccctttcgggtgtcttttctggaatttggtaccgagaggctccatgattcagtatgacttgcctttggtcgaaaaaaaaagcccgcactgtcaggtgcgggcttttttctgtgtttccttattaggacccactttcacatttaagttgtttttctaatccgcatatgatcaattcaaggccgaataagaaggctggctctgcaccttggtgatcaaataattcgatagcttgtcgtaataatggcggcatactatcagtagtaggtgtttccctttcttctttagcgacttgatgctcttgatcttccaatacgcaacctaaagtaaaatgccccacagcgctgagtgcatataatgcattctctagtgaaaaaccttgttggcataaaaaggctaattgattttcgagagtttcatactgtttttctgtaggccgtgtacctaaatgtacttttgctccatcgcgatgacttagtaaagcacatctaaaacttttagcgttattacgtaaaaaatcttgccagctttccccttctaaagggcaaaagtgagtatggtgcctatctaacatctcaatggctaaggcgtcgagcaaagcccgcttattttttacatgccaatacaatgtaggctgctctacacctagcttctgggcgagtttacgggttgttaaaccttcgattccgacctcattaagcagctctaatgcgctgttaatcactttacttttatctaatctggacatattcaccaccctgaattgactctcttccgggcgctatcatgccataccgcgaaaggttttgcgccattcgatggcgcgccgccattgcttgtgcaatgtacatcagagattttgagacacaaccaattattgaaggcctccctaacggggggcctttttttgtttctggtcccccgcttaacgatcgttggctgttttcagcaggacgcactgacctccctatcagtgatagagattgacatccctatcagtgatagagatactgagcacagctgtcaccggatgtgctttccggtctgatgagtccgtgaggacgaaacagcctctacaaataattttgtttaaatcacacgggtaaggaggtatttaaatgaaaacactgtcccaagcacagtcgaagacgagtagccagcagttttctttcaccggtaattctagcgctaacgtgattatcggcaaccagaaactaactatcaacgacgtcgcccgcgttgctcggaacgggaccttagtaagcctgactaacaacactgatatacttcaaggcattcaggcgtcctgtgattatatcaataacgcagttgagtctggtgaaccaatttacggtgtgacctcaggcttcggcggtatggcgaacgttgctatcagccgtgaacaggcctccgaactgcaacataatgtggtatggtcgacgaaaactggtgctgggaacaaactccctttggcggacgtacgtgcagcaatgctgctgcgcgccaactcgcatatgcgtggcgcgtccggtatccgtctggagctgatcaaacgtatggaaatcttcttgaacgctggtgttactccgtacgtttatgaatttggatctatcggcgcttctggagatctggtcccgctgagctacattacgggttccctgattggccttgacccgagcttcaaggtggatttcaacggcaaagaaatggacgccccgaccgcgttacgccagttaaatctgtctcccctgacacttctgcctaaagaagcgctagctatgaccaatgggacctcagtcatgactggcatcgcagctaactgcgtatacgacacccagatcctgactgcgattgcaatgggtgttcacgctctggatatccaggccctgaacggcaccaaccagtctttccacccgtttatccataactctaagccgcacccaggtcagctgtgggcggctgatcagatgatatcattgctggctaactcgcaactggtacgggacgagctggacggcaaacatgattaccgcgaccacgagctgatccaggatcgttatagcctgcgttgccttccgcagtacctgggtccgattgtggacggtatctcacagatagcaaaacaaatcgaaattgaaattaactccgttactgataaccctctgattgacgtcgataaccaggcgtcgtaccacggcggaaatttcctgggtcagtatgttggcatgggtatggaccaccttcgctactatatcggcctgctggcgaaacacctggatgtgcagattgcgctgctagctagtcccgaatttagcaacggactgccgccatctttattgggcaaccgtgaacgtaaggttaacatgggtctgaaaggtttacaaatctgtggcaattccatcatgccgctgctgacgttctacggcaatagcatcgccgaccgctttccgacccatgcagagcaattcaaccagaatatcaactctcagggctacacctccgcaacgctggcgcgacgtagtgttgatatcttccaaaactacgttgcgattgccctgatgtttggcgtccaggctgtagacctgaggacttataaaaagactggccattacgatgcgcgtgcttgcctctctccggctaccgaacgcctgtattccgccgtgcgtcacgtagttggtcagaaacctacttcagatcgcccatacatctggaacgataacgagcagggtctggatgaacacatcgctcgcatctccgctgacattgccgctggcggagtaattgttcaagctgtacaggatatcctgccgtgcctgcactaaccggcttatcggtcagtttcacctgatttacgtaaaaacccgcttcggcgggtttttgcttttggaggggcagaaagatgaatgactgtccacgacgctatacccaaaagaaa

SEQ ID NO: 310 - DNA, 5122 bp, synthetic construct
  source 1..5122: mol_type = other DNA
aggctaggtggaggctcagtgatgataagtctgcgatggtggatgcatgtgtcatggtcatagctgtttcctgtgtgaaattgttatccgctcagagggcacaatcctattccgcgctatccgacaatctccaagacattaggtggagttcagttcggcgagcggaaatggcttacgaacggggcggagatttcctggaagatgccaggaagatacttaacagggaagtgagagggccgcggcaaagccgtttttccataggctccgcccccctgacaagcatcacgaaatctgacgctcaaatcagtggtggcgaaacccgacaggactataaagataccaggcgtttccccctggcggctccctcgtgcgctctcctgttcctgcctttcggtttaccggtgtcattccgctgttatggccgcgtttgtctcattccacgcctgacactcagttccgggtaggcagttcgctccaagctggactgtatgcacgaaccccccgttcagtccgaccgctgcgccttatccggtaactatcgtcttgagtccaacccggaaagacatgcaaaagcaccactggcagcagccactggtaattgatttagaggagttagtcttgaagtcatgcgccggttaaggctaaactgaaaggacaagttttggtgactgcgctcctccaagccagttacctcggttcaaagagttggtagctcagagaaccttcgaaaaaccgccctgcaaggcggttttttcgttttcagagcaagagattacgcgcagaccaaaacgatctcaagaagatcatcttattaagtctgacgctctattcaacaaagccgccgtccatgggtagggggcttcaaatcgtcctcgtgataccaattcggagcctgcttttttgtacaaacttgttgataatggcaattcaaggatcttcacctagatccttttaaattaaaaatgaagttttaaatcaatctaaagtatatatgagtaaacttggtctgacagttaccaatgcttaatcagtgaggcacctatctcagcgatctgtctatttcgttcatccatagttgcctgactccccgtcgtgtagataactacgatacgggagggcttaccatctggccccagtgctgcaatgataccgcgagagccacgctcaccggctccagatttatcagcaataaaccagccagccggaagggccgagcgcagaagtggtcctgcaactttatccgcctccatccagtctattaattgttgccgggaagctagagtaagtagttcgccagttaatagtttgcgcaacgttgttgccattgctacaggcatcgtggtgtcacgctcgtcgtttggtatggcttcattcagctccggttcccaacgatcaaggcgagttacatgatcccccatgttgtgcaaaaaagcggttagctccttcggtcctccgatcgttgtcagaagtaagttggccgcagtgttatcactcatggttatggcagcactgcataattctcttactgtcatgccatccgtaagatgcttttctgtgactggtgagtactcaaccaagtcattctgagaatagtgtatgcggcgaccgagttgctcttgcccggcgtcaatacgggataataccgcgccacatagcagaactttaaaagtgctcatcattggaaaacgttcttcggggcgaaaactctcaaggatcttaccgctgttgagatccagttcgatgtaacccactcgtgcacccaactgatcttcagcatcttttactttcaccagcgtttctgggtgagcaaaaacaggaaggcaaaatgccgcaaaaaagggaataagggcgacacggaaatgttgaatactcatactcttcctttttcaatattattgaagcatttatcagggttattgtctcatgagcggatacatatttgaatgtatttagaaaaataaacaaataggggttccgcgcacatttccccgaaaagtgccagatacctgaaacaaaacccatcgtacggccaaggaagtctccaataactgtgatccaccacaagcgccagggttttcccagtcacgacgttgtaaaacgacggccagtcatgcataatccgcacgcatctggaataaggaagtgccattccgcctgacctttgcctatgaggaccaaaacgaaaaaacaccctttcgggtgtcttttctggaatttggtaccgagaggctccatgattcagtatgacttgcctttggtcgaaaaaaaaagcccgcactgtcaggtgcgggcttttttctgtgtttccttattaggacccactttcacatttaagttgtttttctaatccgcatatgatcaattcaaggccgaataagaaggctggctctgcaccttggtgatcaaataattcgatagcttgtcgtaataatggcggcatactatcagtagtaggtgtttccctttcttctttagcgacttgatgctcttgatcttccaatacgcaacctaaagtaaaatgccccacagcgctgagtgcatataatgcattctctagtgaaaaaccttgttggcataaaaaggctaattgattttcgagagtttcatactgtttttctgtaggccgtgtacctaaatgtacttttgctccatcgcgatgacttagtaaagcacatctaaaacttttagcgttattacgtaaaaaatcttgccagctttccccttctaaagggcaaaagtgagtatggtgcctatctaacatctcaatggctaaggcgtcgagcaaagcccgcttattttttacatgccaatacaatgtaggctgctctacacctagcttctgggcgagtttacgggttgttaaaccttcgattccgacctcattaagcagctctaatgcgctgttaatcactttacttttatctaatctggacatattcaccaccctgaattgactctcttccgggcgctatcatgccataccgcgaaaggttttgcgccattcgatggcgcgccgccattgcttgtgcaatgtacatcagagattttgagacacaaccaattattgaaggcctccctaacggggggcctttttttgtttctggtcccccgcttaacgatcgttggctgttttcagcaggacgcactgacctccctatcagtgatagagattgacatccctatcagtgatagagatactgagcacagctgtcaccggatgtgctttccggtctgatgagtccgtgaggacgaaacagcctctacaaataattttgtttaaatcacacgggtaaggaggtatttaaatgaaaacactgtcccaagcacagtcgaagacgagtagccagcagttttctttcaccggtaattctagcgctaacgtgattatcggcaaccagaaactaactatcaacgacgtcgcccgcgttgctcggaacgggaccttagtaagcctgactaacaacactgatatacttcaaggcattcaggcgtcctgtgattatatcaataacgcagttgagtctggtgaaccaatttacggtgtgacctcaggcttcggcggtatggcgaacgttgctatcagccgtgaacaggcctccgaactgcaatcgaatttggtatggcacctgaaaactggtgctgggaacaaactccctttggcggacgtacgtgcagcaatgctgctgcgcgccaactcgcatatgcgtggcgcgtccggtatccgtctggagctgatcaaacgtatggaaatcttcttgaacgctggtgttactccgtacgtttatgaatttggatctatcggcgcttctggagatctggtcccgctgagctacattacgggttccctgattggccttgacccgagcttcaaggtggatttcaacggcaaagaaatggacgccccgaccgcgttacgccagttaaatctgtctcccctgacacttctgcctaaagaaggtattgctatgattaatgggacctcagtcatgactggcatcgcagctaactgcgtatacgacacccagatcctgactgcgattgcaatgggtgttcacgctctggatatccaggccctgaacggcaccaaccagtctttccacccgtttatccataactctaagccgcacccaggtcagctgtgggcggctgatcagatgatatcattgctggctaactcgcaactggtacgggacgagctggacggcaaacatgattaccgcgaccacgagctgatccaggatcgttatagcctgcgttgccttccgcagtacctgggtccgattgtggacggtatctcacagatagcaaaacaaatcgaaattgaaattaactccgttactgataaccctctgattgacgtcgataaccaggcgtcgtaccacggcggaaatttcctgggtcagtatgttggcatgggtatggaccaccttcgctactatatcggcctgctggcgaaacacctggatgtgcagattgcgctgctagctagtcccgaatttagcaacggactgccgccatctttattgggcaaccgtgaacgtaaggttaacatgggtctgaaaggtttacaaatctgtggcaattccatcatgccgctgctgacgttctacggcaatagcatcgccgaccgctttccgacccatgcagagcaattcaaccagaatatcaactctcagggctacacctccgcaacgctggcgcgacgtagtgttgatatcttccaaaactacgttgcgattgccctgatgtttggcgtccaggctgtagacctgaggacttataaaaagactggccattacgatgcgcgtgcttgcctctctccggctaccgaacgcctgtattccgccgtgcgtcacgtagttggtcagaaacctacttcagatcgcccatacatctggaacgataacgagcagggtctggatgaacacatcgctcgcatctccgctgacattgccgctggcggagtaattgttcaagctgtacaggatatcctgccgtgcctgcactaaccggcttatcggtcagtttcacctgatttacgtaaaaacccgcttcggcgggtttttgcttttggaggggcagaaagatgaatgactgtccacgacgctatacccaaaagaaa

SEQ ID NO: 311 - DNA, 5122 bp, synthetic construct
  source 1..5122: mol_type = other DNA
aggctaggtggaggctcagtgatgataagtctgcgatggtggatgcatgtgtcatggtcatagctgtttcctgtgtgaaattgttatccgctcagagggcacaatcctattccgcgctatccgacaatctccaagacattaggtggagttcagttcggcgagcggaaatggcttacgaacggggcggagatttcctggaagatgccaggaagatacttaacagggaagtgagagggccgcggcaaagccgtttttccataggctccgcccccctgacaagcatcacgaaatctgacgctcaaatcagtggtggcgaaacccgacaggactataaagataccaggcgtttccccctggcggctccctcgtgcgctctcctgttcctgcctttcggtttaccggtgtcattccgctgttatggccgcgtttgtctcattccacgcctgacactcagttccgggtaggcagttcgctccaagctggactgtatgcacgaaccccccgttcagtccgaccgctgcgccttatccggtaactatcgtcttgagtccaacccggaaagacatgcaaaagcaccactggcagcagccactggtaattgatttagaggagttagtcttgaagtcatgcgccggttaaggctaaactgaaaggacaagttttggtgactgcgctcctccaagccagttacctcggttcaaagagttggtagctcagagaaccttcgaaaaaccgccctgcaaggcggttttttcgttttcagagcaagagattacgcgcagaccaaaacgatctcaagaagatcatcttattaagtctgacgctctattcaacaaagccgccgtccatgggtagggggcttcaaatcgtcctcgtgataccaattcggagcctgcttttttgtacaaacttgttgataatggcaattcaaggatcttcacctagatccttttaaattaaaaatgaagttttaaatcaatctaaagtatatatgagtaaacttggtctgacagttaccaatgcttaatcagtgaggcacctatctcagcgatctgtctatttcgttcatccatagttgcctgactccccgtcgtgtagataactacgatacgggagggcttaccatctggccccagtgctgcaatgataccgcgagagccacgctcaccggctccagatttatcagcaataaaccagccagccggaagggccgagcgcagaagtggtcctgcaactttatccgcctccatccagtctattaattgttgccgggaagctagagtaagtagttcgccagttaatagtttgcgcaacgttgttgccattgctacaggcatcgtggtgtcacgctcgtcgtttggtatggcttcattcagctccggttcccaacgatcaaggcgagttacatgatcccccatgttgtgcaaaaaagcggttagctccttcggtcctccgatcgttgtcagaagtaagttggccgcagtgttatcactcatggttatggcagcactgcataattctcttactgtcatgccatccgtaagatgcttttctgtgactggtgagtactcaaccaagtcattctgagaatagtgtatgcggcgaccgagttgctcttgcccggcgtcaatacgggataataccgcgccacatagcagaactttaaaagtgctcatcattggaaaacgttcttcggggcgaaaactctcaaggatcttaccgctgttgagatccagttcgatgtaacccactcgtgcacccaactgatcttcagcatcttttactttcaccagcgtttctgggtgagcaaaaacaggaaggcaaaatgccgcaaaaaagggaataagggcgacacggaaatgttgaatactcatactcttcctttttcaatattattgaagcatttatcagggttattgtctcatgagcggatacatatttgaatgtatttagaaaaataaacaaataggggttccgcgcacatttccccgaaaagtgccagatacctgaaacaaaacccatcgtacggccaaggaagtctccaataactgtgatccaccacaagcgccagggttttcccagtcacgacgttgtaaaacgacggccagtcatgcataatccgcacgcatctggaataaggaagtgccattccgcctgacctttgcctatgaggaccaaaacgaaaaaacaccctttcgggtgtcttttctggaatttggtaccgagaggctccatgattcagtatgacttgcctttggtcgaaaaaaaaagcccgcactgtcaggtgcgggcttttttctgtgtttccttattaggacccactttcacatttaagttgtttttctaatccgcatatgatcaattcaaggccgaataagaaggctggctctgcaccttggtgatcaaataattcgatagcttgtcgtaataatggcggcatactatcagtagtaggtgtttccctttcttctttagcgacttgatgctcttgatcttccaatacgcaacctaaagtaaaatgccccacagcgctgagtgcatataatgcattctctagtgaaaaaccttgttggcataaaaaggctaattgattttcgagagtttcatactgtttttctgtaggccgtgtacctaaatgtacttttgctccatcgcgatgacttagtaaagcacatctaaaacttttagcgttattacgtaaaaaatcttgccagctttccccttctaaagggcaaaagtgagtatggtgcctatctaacatctcaatggctaaggcgtcgagcaaagcccgcttattttttacatgccaatacaatgtaggctgctctacacctagcttctgggcgagtttacgggttgttaaaccttcgattccgacctcattaagcagctctaatgcgctgttaatcactttacttttatctaatctggacatattcaccaccctgaattgactctcttccgggcgctatcatgccataccgcgaaaggttttgcgccattcgatggcgcgccgccattgcttgtgcaatgtacatcagagattttgagacacaaccaattattgaaggcctccctaacggggggcctttttttgtttctggtcccccgcttaacgatcgttggctgttttcagcaggacgcactgacctccctatcagtgatagagattgacatccctatcagtgatagagatactgagcacagctgtcaccggatgtgctttccggtctgatgagtccgtgaggacgaaacagcctctacaaataattttgtttaaatcacacgggtaaggaggtatttaaatgaaaacactgtcccaagcacagtcgaagacgagtagccagcagttttctttcaccggtaattctagcgctaacgtgattatcggcaaccagaaactaactatcaacgacgtcgcccgcgttgctcggaacgggaccttagtaagcctgactaacaacactgatatacttcaaggcattcaggcgtcctgtgattatatcaataacgcagttgagtctggtgaaccaatttacggtgtgacctcaggcttcggcggtatggcgaacgttgctatcagccgtgaacaggcctccgaactgcaaagcaatgcggtatggcacctgaaaactggtgctgggaacaaactccctttggcggacgtacgtgcagcaatgctgctgcgcgccaactcgcatatgcgtggcgcgtccggtatccgtctggagctgatcaaacgtatggaaatcttcttgaacgctggtgttactccgtacgtttatgaatttggatctatcggcgcttctggagatctggtcccgctgagctacattacgggttccctgattggccttgacccgagcttcaaggtggatttcaacggcaaagaaatggacgccccgaccgcgttacgccagttaaatctgtctcccctgacacttctgcctaaagaaggtctagctatgttgaatgggacctcagtcatgactggcatcgcagctaactgcgtatacgacacccagatcctgactgcgattgcaatgggtgttcacgctctggatatccaggccctgaacggcaccaaccagtctttccacccgtttatccataactctaagccgcacccaggtcagctgtgggcggctgatcagatgatatcattgctggctaactcgcaactggtacgggacgagctggacggcaaacatgattaccgcgaccacgagctgatccaggatcgttatagcctgcgttgccttccgcagtacctgggtccgattgtggacggtatctcacagatagcaaaacaaatcgaaattgaaattaactccgttactgataaccctctgattgacgtcgataaccaggcgtcgtaccacggcggaaatttcctgggtcagtatgttggcatgggtatggaccaccttcgctactatatcggcctgctggcgaaacacctggatgtgcagattgcgctgctagctagtcccgaatttagcaacggactgccgccatctttattgggcaaccgtgaacgtaaggttaacatgggtctgaaaggtttacaaatctgtggcaattccatcatgccgctgctgacgttctacggcaatagcatcgccgaccgctttccgacccatgcagagcaattcaaccagaatatcaactctcagggctacacctccgcaacgctggcgcgacgtagtgttgatatcttccaaaactacgttgcgattgccctgatgtttggcgtccaggctgtagacctgaggacttataaaaagactggccattacgatgcgcgtgcttgcctctctccggctaccgaacgcctgtattccgccgtgcgtcacgtagttggtcagaaacctacttcagatcgcccatacatctggaacgataacgagcagggtctggatgaacacatcgctcgcatctccgctgacattgccgctggcggagtaattgttcaagctgtacaggatatcctgccgtgcctgcactaaccggcttatcggtcagtttcacctgatttacgtaaaaacccgcttcggcgggtttttgcttttggaggggcagaaagatgaatgactgtccacgacgctatacccaaaagaaa

SEQ ID NO: 312 - DNA, 5122 bp, synthetic construct
  source 1..5122: mol_type = other DNA
aggctaggtggaggctcagtgatgataagtctgcgatggtggatgcatgtgtcatggtcatagctgtttcctgtgtgaaattgttatccgctcagagggcacaatcctattccgcgctatccgacaatctccaagacattaggtggagttcagttcggcgagcggaaatggcttacgaacggggcggagatttcctggaagatgccaggaagatacttaacagggaagtgagagggccgcggcaaagccgtttttccataggctccgcccccctgacaagcatcacgaaatctgacgctcaaatcagtggtggcgaaacccgacaggactataaagataccaggcgtttccccctggcggctccctcgtgcgctctcctgttcctgcctttcggtttaccggtgtcattccgctgttatggccgcgtttgtctcattccacgcctgacactcagttccgggtaggcagttcgctccaagctggactgtatgcacgaaccccccgttcagtccgaccgctgcgccttatccggtaactatcgtcttgagtccaacccggaaagacatgcaaaagcaccactggcagcagccactggtaattgatttagaggagttagtcttgaagtcatgcgccggttaaggctaaactgaaaggacaagttttggtgactgcgctcctccaagccagttacctcggttcaaagagttggtagctcagagaaccttcgaaaaaccgccctgcaaggcggttttttcgttttcagagcaagagattacgcgcagaccaaaacgatctcaagaagatcatcttattaagtctgacgctctattcaacaaagccgccgtccatgggtagggggcttcaaatcgtcctcgtgataccaattcggagcctgcttttttgtacaaacttgttgataatggcaattcaaggatcttcacctagatccttttaaattaaaaatgaagttttaaatcaatctaaagtatatatgagtaaacttggtctgacagttaccaatgcttaatcagtgaggcacctatctcagcgatctgtctatttcgttcatccatagttgcctgactccccgtcgtgtagataactacgatacgggagggcttaccatctggccccagtgctgcaatgataccgcgagagccacgctcaccggctccagatttatcagcaataaaccagccagccggaagggccgagcgcagaagtggtcctgcaactttatccgcctccatccagtctattaattgttgccgggaagctagagtaagtagttcgccagttaatagtttgcgcaacgttgttgccattgctacaggcatcgtggtgtcacgctcgtcgtttggtatggcttcattcagctccggttcccaacgatcaaggcgagttacatgatcccccatgttgtgcaaaaaagcggttagctccttcggtcctccgatcgttgtcagaagtaagttggccgcagtgttatcactcatggttatggcagcactgcataattctcttactgtcatgccatccgtaagatgcttttctgtgactggtgagtactcaaccaagtcattctgagaatagtgtatgcggcgaccgagttgctcttgcccggcgtcaatacgggataataccgcgccacatagcagaactttaaaagtgctcatcattggaaaacgttcttcggggcgaaaactctcaaggatcttaccgctgttgagatccagttcgatgtaacccactcgtgcacccaactgatcttcagcatcttttactttcaccagcgtttctgggtgagcaaaaacaggaaggcaaaatgccgcaaaaaagggaataagggcgacacggaaatgttgaatactcatactcttcctttttcaatattattgaagcatttatcagggttattgtctcatgagcggatacatatttgaatgtatttagaaaaataaacaaataggggttccgcgcacatttccccgaaaagtgccagatacctgaaacaaaacccatcgtacggccaaggaagtctccaataactgtgatccaccacaagcgccagggttttcccagtcacgacgttgtaaaacgacggccagtcatgcataatccgcacgcatctggaataaggaagtgccattccgcctgacctttgcctatgaggaccaaaacgaaaaaacaccctttcgggtgtcttttctggaatttggtaccgagaggctccatgattcagtatgacttgcctttggtcgaaaaaaaaagcccgcactgtcaggtgcgggcttttttctgtgtttccttattaggacccactttcacatttaagttgtttttctaatccgcatatgatcaattcaaggccgaataagaaggctggctctgcaccttggtgatcaaataattcgatagcttgtcgtaataatggcggcatactatcagtagtaggtgtttccctttcttctttagcgacttgatgctcttgatcttccaatacgcaacctaaagtaaaatgccccacagcgctgagtgcatataatgcattctctagtgaaaaaccttgttggcataaaaaggctaattgattttcgagagtttcatactgtttttctgtaggccgtgtacctaaatgtacttttgctccatcgcgatgacttagtaaagcacatctaaaacttttagcgttattacgtaaaaaatcttgccagctttccccttctaaagggcaaaagtgagtatggtgcctatctaacatctcaatggctaaggcgtcgagcaaagcccgcttattttttacatgccaatacaatgtaggctgctctacacctagcttctgggcgagtttacgggttgttaaaccttcgattccgacctcattaagcagctctaatgcgctgttaatcactttacttttatctaatctggacatattcaccaccctgaattgactctcttccgggcgctatcatgccataccgcgaaaggttttgcgccattcgatggcgcgccgccattgcttgtgcaatgtacatcagagattttgagacacaaccaattattgaaggcctccctaacggggggcctttttttgtttctggtcccccgcttaacgatcgttggctgttttcagcaggacgcactgacctccctatcagtgatagagattgacatccctatcagtgatagagatactgagcacagctgtcaccggatgtgctttccggtctgatgagtccgtgaggacgaaacagcctctacaaataattttgtttaaatcacacgggtaaggaggtatttaaatgaaaacactgtcccaagcacagtcgaagacgagtagccagcagttttctttcaccggtaattctagcgctaacgtgattatcggcaaccagaaactaactatcaacgacgtcgcccgcgttgctcggaacgggaccttagtaagcctgactaacaacactgatatacttcaaggcattcaggcgtcctgtgattatatcaataacgcagttgagtctggtgaaccaatttacggtgtgacctcaggcttcggcggtatggcgaacgttgctatcagccgtgaacaggcctccgaactgcaaaagaatatggtatggtatcataaaactggtgctgggaacaaactccctttggcggacgtacgtgcagcaatgctgctgcgcgccaactcgcatatgcgtggcgcgtccggtatccgtctggagctgatcaaacgtatggaaatcttcttgaacgctggtgttactccgtacgtttatgaatttggatctatcggcgcttctggagatctggtcccgctgagctacattacgggttccctgattggccttgacccgagcttcaaggtggatttcaacggcaaagaaatggacgccccgaccgcgttacgccagttaaatctgtctcccctgacacttctgcctaaagaagcgctagctatgattaatgggacctcagtcatgactggcatcgcagctaactgcgtatacgacacccagatcctgactgcgattgcaatgggtgttcacgctctggatatccaggccctgaacggcaccaaccagtctttccacccgtttatccataactctaagccgcacccaggtcagctgtgggcggctgatcagatgatatcattgctggctaactcgcaactggtacgggacgagctggacggcaaacatgattaccgcgaccacgagctgatccaggatcgttatagcctgcgttgccttccgcagtacctgggtccgattgtggacggtatctcacagatagcaaaacaaatcgaaattgaaattaactccgttactgataaccctctgattgacgtcgataaccaggcgtcgtaccacggcggaaatttcctgggtcagtatgttggcatgggtatggaccaccttcgctactatatcggcctgctggcgaaacacctggatgtgcagattgcgctgctagctagtcccgaatttagcaacggactgccgccatctttattgggcaaccgtgaacgtaaggttaacatgggtctgaaaggtttacaaatctgtggcaattccatcatgccgctgctgacgttctacggcaatagcatcgccgaccgctttccgacccatgcagagcaattcaaccagaatatcaactctcagggctacacctccgcaacgctggcgcgacgtagtgttgatatcttccaaaactacgttgcgattgccctgatgtttggcgtccaggctgtagacctgaggacttataaaaagactggccattacgatgcgcgtgcttgcctctctccggctaccgaacgcctgtattccgccgtgcgtcacgtagttggtcagaaacctacttcagatcgcccatacatctggaacgataacgagcagggtctggatgaacacatcgctcgcatctccgctgacattgccgctggcggagtaattgttcaagctgtacaggatatcctgccgtgcctgcactaaccggcttatcggtcagtttcacctgatttacgtaaaaacccgcttcggcgggtttttgcttttggaggggcagaaagatgaatgactgtccacgacgctatacccaaaagaaa

SEQ ID NO: 313 - DNA, 5122 bp, synthetic construct
  source 1..5122: mol_type = other DNA
aggctaggtggaggctcagtgatgataagtctgcgatggtggatgcatgtgtcatggtcatagctgtttcctgtgtgaaattgttatccgctcagagggcacaatcctattccgcgctatccgacaatctccaagacattaggtggagttcagttcggcgagcggaaatggcttacgaacggggcggagatttcctggaagatgccaggaagatacttaacagggaagtgagagggccgcggcaaagccgtttttccataggctccgcccccctgacaagcatcacgaaatctgacgctcaaatcagtggtggcgaaacccgacaggactataaagataccaggcgtttccccctggcggctccctcgtgcgctctcctgttcctgcctttcggtttaccggtgtcattccgctgttatggccgcgtttgtctcattccacgcctgacactcagttccgggtaggcagttcgctccaagctggactgtatgcacgaaccccccgttcagtccgaccgctgcgccttatccggtaactatcgtcttgagtccaacccggaaagacatgcaaaagcaccactggcagcagccactggtaattgatttagaggagttagtcttgaagtcatgcgccggttaaggctaaactgaaaggacaagttttggtgactgcgctcctccaagccagttacctcggttcaaagagttggtagctcagagaaccttcgaaaaaccgccctgcaaggcggttttttcgttttcagagcaagagattacgcgcagaccaaaacgatctcaagaagatcatcttattaagtctgacgctctattcaacaaagccgccgtccatgggtagggggcttcaaatcgtcctcgtgataccaattcggagcctgcttttttgtacaaacttgttgataatggcaattcaaggatcttcacctagatccttttaaattaaaaatgaagttttaaatcaatctaaagtatatatgagtaaacttggtctgacagttaccaatgcttaatcagtgaggcacctatctcagcgatctgtctatttcgttcatccatagttgcctgactccccgtcgtgtagataactacgatacgggagggcttaccatctggccccagtgctgcaatgataccgcgagagccacgctcaccggctccagatttatcagcaataaaccagccagccggaagggccgagcgcagaagtggtcctgcaactttatccgcctccatccagtctattaattgttgccgggaagctagagtaagtagttcgccagttaatagtttgcgcaacgttgttgccattgctacaggcatcgtggtgtcacgctcgtcgtttggtatggcttcattcagctccggttcccaacgatcaaggcgagttacatgatcccccatgttgtgcaaaaaagcggttagctccttcggtcctccgatcgttgtcagaagtaagttggccgcagtgttatcactcatggttatggcagcactgcataattctcttactgtcatgccatccgtaagatgcttttctgtgactggtgagtactcaaccaagtcattctgagaatagtgtatgcggcgaccgagttgctcttgcccggcgtcaatacgggataataccgcgccacatagcagaactttaaaagtgctcatcattggaaaacgttcttcggggcgaaaactctcaaggatcttaccgctgttgagatccagttcgatgtaacccactcgtgcacccaactgatcttcagcatcttttactttcaccagcgtttctgggtgagcaaaaacaggaaggcaaaatgccgcaaaaaagggaataagggcgacacggaaatgttgaatactcatactcttcctttttcaatattattgaagcatttatcagggttattgtctcatgagcggatacatatttgaatgtatttagaaaaataaacaaataggggttccgcgcacatttccccgaaaagtgccagatacctgaaacaaaacccatcgtacggccaaggaagtctccaataactgtgatccaccacaagcgccagggttttcccagtcacgacgttgtaaaacgacggccagtcatgcataatccgcacgcatctggaataaggaagtgccattccgcctgacctttgcctatgaggaccaaaacgaaaaaacaccctttcgggtgtcttttctggaatttggtaccgagaggctccatgattcagtatgacttgcctttggtcgaaaaaaaaagcccgcactgtcaggtgcgggcttttttctgtgtttccttattaggacccactttcacatttaagttgtttttctaatccgcatatgatcaattcaaggccgaataagaaggctggctctgcaccttggtgatcaaataattcgatagcttgtcgtaataatggcggcatactatcagtagtaggtgtttccctttcttctttagcgacttgatgctcttgatcttccaatacgcaacctaaagtaaaatgccccacagcgctgagtgcatataatgcattctctagtgaaaaaccttgttggcataaaaaggctaattgattttcgagagtttcatactgtttttctgtaggccgtgtacctaaatgtacttttgctccatcgcgatgacttagtaaagcacatctaaaacttttagcgttattacgtaaaaaatcttgccagctttccccttctaaagggcaaaagtgagtatggtgcctatctaacatctcaatggctaaggcgtcgagcaaagcccgcttattttttacatgccaatacaatgtaggctgctctacacctagcttctgggcgagtttacgggttgttaaaccttcgattccgacctcattaagcagctctaatgcgctgttaatcactttacttttatctaatctggacatattcaccaccctgaattgactctcttccgggcgctatcatgccataccgcgaaaggttttgcgccattcgatggcgcgccgccattgcttgtgcaatgtacatcagagattttgagacacaaccaattattgaaggcctccctaacggggggcctttttttgtttctggtcccccgcttaacgatcgttggctgttttcagcaggacgcactgacctccctatcagtgatagagattgacatccctatcagtgatagagatactgagcacagctgtcaccggatgtgctttccggtctgatgagtccgtgaggacgaaacagcctctacaaataattttgtttaaatcacacgggtaaggaggtatttaaatgaaaacactgtcccaagcacagtcgaagacgagtagccagcagttttctttcaccggtaattctagcgctaacgtgattatcggcaaccagaaactaactatcaacgacgtcgcccgcgttgctcggaacgggaccttagtaagcctgactaacaacactgatatacttcaaggcattcaggcgtcctgtgattatatcaataacgcagttgagtctggtgaaccaatttacggtgtgacctcaggcttcggcggtatggcgaacgttgctatcagccgtgaacaggcctccgaactgcaagagaatgcggtatggtttatgaaaactggtgctgggaacaaactccctttggcggacgtacgtgcagcaatgctgctgcgcgccaactcgcatatgcgtggcgcgtccggtatccgtctggagctgatcaaacgtatggaaatcttcttgaacgctggtgttactccgtacgtttatgaatttggatctatcggcgcttctggagatctggtcccgctgagctacattacgggttccctgattggccttgacccgagcttcaaggtggatttcaacggcaaagaaatggacgccccgaccgcgttacgccagttaaatctgtctcccctgacacttctgcctaaagaaggtctagctatggtcaatgggacctcagtcatgactggcatcgcagctaactgcgtatacgacacccagatcctgactgcgattgcaatgggtgttcacgctctggatatccaggccctgaacggcaccaaccagtctttccacccgtttatccataactctaagccgcacccaggtcagctgtgggcggctgatcagatgatatcattgctggctaactcgcaactggtacgggacgagctggacggcaaacatgattaccgcgaccacgagctgatccaggatcgttatagcctgcgttgccttccgcagtacctgggtccgattgtggacggtatctcacagatagcaaaacaaatcgaaattgaaattaactccgttactgataaccctctgattgacgtcgataaccaggcgtcgtaccacggcggaaatttcctgggtcagtatgttggcatgggtatggaccaccttcgctactatatcggcctgctggcgaaacacctggatgtgcagattgcgctgctagctagtcccgaatttagcaacggactgccgccatctttattgggcaaccgtgaacgtaaggttaacatgggtctgaaaggtttacaaatctgtggcaattccatcatgccgctgctgacgttctacggcaatagcatcgccgaccgctttccgacccatgcagagcaattcaaccagaatatcaactctcagggctacacctccgcaacgctggcgcgacgtagtgttgatatcttccaaaactacgttgcgattgccctgatgtttggcgtccaggctgtagacctgaggacttataaaaagactggccattacgatgcgcgtgcttgcctctctccggctaccgaacgcctgtattccgccgtgcgtcacgtagttggtcagaaacctacttcagatcgcccatacatctggaacgataacgagcagggtctggatgaacacatcgctcgcatctccgctgacattgccgctggcggagtaattgttcaagctgtacaggatatcctgccgtgcctgcactaaccggcttatcggtcagtttcacctgatttacgtaaaaacccgcttcggcgggtttttgcttttggaggggcagaaagatgaatgactgtccacgacgctatacccaaaagaaa

SEQ ID NO: 314 - DNA, 5122 bp, synthetic construct
  source 1..5122: mol_type = other DNA
aggctaggtggaggctcagtgatgataagtctgcgatggtggatgcatgtgtcatggtcatagctgtttcctgtgtgaaattgttatccgctcagagggcacaatcctattccgcgctatccgacaatctccaagacattaggtggagttcagttcggcgagcggaaatggcttacgaacggggcggagatttcctggaagatgccaggaagatacttaacagggaagtgagagggccgcggcaaagccgtttttccataggctccgcccccctgacaagcatcacgaaatctgacgctcaaatcagtggtggcgaaacccgacaggactataaagataccaggcgtttccccctggcggctccctcgtgcgctctcctgttcctgcctttcggtttaccggtgtcattccgctgttatggccgcgtttgtctcattccacgcctgacactcagttccgggtaggcagttcgctccaagctggactgtatgcacgaaccccccgttcagtccgaccgctgcgccttatccggtaactatcgtcttgagtccaacccggaaagacatgcaaaagcaccactggcagcagccactggtaattgatttagaggagttagtcttgaagtcatgcgccggttaaggctaaactgaaaggacaagttttggtgactgcgctcctccaagccagttacctcggttcaaagagttggtagctcagagaaccttcgaaaaaccgccctgcaaggcggttttttcgttttcagagcaagagattacgcgcagaccaaaacgatctcaagaagatcatcttattaagtctgacgctctattcaacaaagccgccgtccatgggtagggggcttcaaatcgtcctcgtgataccaattcggagcctgcttttttgtacaaacttgttgataatggcaattcaaggatcttcacctagatccttttaaattaaaaatgaagttttaaatcaatctaaagtatatatgagtaaacttggtctgacagttaccaatgcttaatcagtgaggcacctatctcagcgatctgtctatttcgttcatccatagttgcctgactccccgtcgtgtagataactacgatacgggagggcttaccatctggccccagtgctgcaatgataccgcgagagccacgctcaccggctccagatttatcagcaataaaccagccagccggaagggccgagcgcagaagtggtcctgcaactttatccgcctccatccagtctattaattgttgccgggaagctagagtaagtagttcgccagttaatagtttgcgcaacgttgttgccattgctacaggcatcgtggtgtcacgctcgtcgtttggtatggcttcattcagctccggttcccaacgatcaaggcgagttacatgatcccccatgttgtgcaaaaaagcggttagctccttcggtcctccgatcgttgtcagaagtaagttggccgcagtgttatcactcatggttatggcagcactgcataattctcttactgtcatgccatccgtaagatgcttttctgtgactggtgagtactcaaccaagtcattctgagaatagtgtatgcggcgaccgagttgctcttgcccggcgtcaatacgggataataccgcgccacatagcagaactttaaaagtgctcatcattggaaaacgttcttcggggcgaaaactctcaaggatcttaccgctgttgagatccagttcgatgtaacccactcgtgcacccaactgatcttcagcatcttttactttcaccagcgtttctgggtgagcaaaaacaggaaggcaaaatgccgcaaaaaagggaataagggcgacacggaaatgttgaatactcatactcttcctttttcaatattattgaagcatttatcagggttattgtctcatgagcggatacatatttgaatgtatttagaaaaataaacaaataggggttccgcgcacatttccccgaaaagtgccagatacctgaaacaaaacccatcgtacggccaaggaagtctccaataactgtgatccaccacaagcgccagggttttcccagtcacgacgttgtaaaacgacggccagtcatgcataatccgcacgcatctggaataaggaagtgccattccgcctgacctttgcctatgaggaccaaaacgaaaaaacaccctttcgggtgtcttttctggaatttggtaccgagaggctccatgattcagtatgacttgcctttggtcgaaaaaaaaagcccgcactgtcaggtgcgggcttttttctgtgtttccttattaggacccactttcacatttaagttgtttttctaatccgcatatgatcaattcaaggccgaataagaaggctggctctgcaccttggtgatcaaataattcgatagcttgtcgtaataatggcggcatactatcagtagtaggtgtttccctttcttctttagcgacttgatgctcttgatcttccaatacgcaacctaaagtaaaatgccccacagcgctgagtgcatataatgcattctctagtgaaaaaccttgttggcataaaaaggctaattgattttcgagagtttcatactgtttttctgtaggccgtgtacctaaatgtacttttgctccatcgcgatgacttagtaaagcacatctaaaacttttagcgttattacgtaaaaaatcttgccagctttccccttctaaagggcaaaagtgagtatggtgcctatctaacatctcaatggctaaggcgtcgagcaaagcccgcttattttttacatgccaatacaatgtaggctgctctacacctagcttctgggcgagtttacgggttgttaaaccttcgattccgacctcattaagcagctctaatgcgctgttaatcactttacttttatctaatctggacatattcaccaccctgaattgactctcttccgggcgctatcatgccataccgcgaaaggttttgcgccattcgatggcgcgccgccattgcttgtgcaatgtacatcagagattttgagacacaaccaattattgaaggcctccctaacggggggcctttttttgtttctggtcccccgcttaacgatcgttggctgttttcagcaggacgcactgacctccctatcagtgatagagattgacatccctatcagtgatagagatactgagcacagctgtcaccggatgtgctttccggtctgatgagtccgtgaggacgaaacagcctctacaaataattttgtttaaatcacacgggtaaggaggtatttaaatgaaaacactgtcccaagcacagtcgaagacgagtagccagcagttttctttcaccggtaattctagcgctaacgtgattatcggcaaccagaaactaactatcaacgacgtcgcccgcgttgctcggaacgggaccttagtaagcctgactaacaacactgatatacttcaaggcattcaggcgtcctgtgattatatcaataacgcagttgagtctggtgaaccaatttacggtgtgacctcaggcttcggcggtatggcgaacgttgctatcagccgtgaacaggcctccgaactgcaacataatgtcgtatggcacacgaaaactggtgctgggaacaaactccctttggcggacgtacgtgcagcaatgctgctgcgcgccaactcgcatatgcgtggcgcgtccggtatccgtctggagctgatcaaacgtatggaaatcttcttgaacgctggtgttactccgtacgtttatgaatttggatctatcggcgcttctggagatctggtcccgctgagctacattacgggttccctgattggccttgacccgagcttcaaggtggatttcaacggcaaagaaatggacgccccgaccgcgttacgccagttaaatctgtctcccctgacacttctgcctaaagaaggtctagctatgattaatgggacctcagtcatgactggcatcgcagctaactgcgtatacgacacccagatcctgactgcgattgcaatgggtgttcacgctctggatatccaggccctgaacggcaccaaccagtctttccacccgtttatccataactctaagccgcacccaggtcagctgtgggcggctgatcagatgatatcattgctggctaactcgcaactggtacgggacgagctggacggcaaacatgattaccgcgaccacgagctgatccaggatcgttatagcctgcgttgccttccgcagtacctgggtccgattgtggacggtatctcacagatagcaaaacaaatcgaaattgaaattaactccgttactgataaccctctgattgacgtcgataaccaggcgtcgtaccacggcggaaatttcctgggtcagtatgttggcatgggtatggaccaccttcgctactatatcggcctgctggcgaaacacctggatgtgcagattgcgctgctagctagtcccgaatttagcaacggactgccgccatctttattgggcaaccgtgaacgtaaggttaacatgggtctgaaaggtttacaaatctgtggcaattccatcatgccgctgctgacgttctacggcaatagcatcgccgaccgctttccgacccatgcagagcaattcaaccagaatatcaactctcagggctacacctccgcaacgctggcgcgacgtagtgttgatatcttccaaaactacgttgcgattgccctgatgtttggcgtccaggctgtagacctgaggacttataaaaagactggccattacgatgcgcgtgcttgcctctctccggctaccgaacgcctgtattccgccgtgcgtcacgtagttggtcagaaacctacttcagatcgcccatacatctggaacgataacgagcagggtctggatgaacacatcgctcgcatctccgctgacattgccgctggcggagtaattgttcaagctgtacaggatatcctgccgtgcctgcactaaccggcttatcggtcagtttcacctgatttacgtaaaaacccgcttcggcgggtttttgcttttggaggggcagaaagatgaatgactgtccacgacgctatacccaaaagaaa

SEQ ID NO: 315 - DNA, 5122 bp, synthetic construct
  source 1..5122: mol_type = other DNA
aggctaggtggaggctcagtgatgataagtctgcgatggtggatgcatgtgtcatggtcatagctgtttcctgtgtgaaattgttatccgctcagagggcacaatcctattccgcgctatccgacaatctccaagacattaggtggagttcagttcggcgagcggaaatggcttacgaacggggcggagatttcctggaagatgccaggaagatacttaacagggaagtgagagggccgcggcaaagccgtttttccataggctccgcccccctgacaagcatcacgaaatctgacgctcaaatcagtggtggcgaaacccgacaggactataaagataccaggcgtttccccctggcggctccctcgtgcgctctcctgttcctgcctttcggtttaccggtgtcattccgctgttatggccgcgtttgtctcattccacgcctgacactcagttccgggtaggcagttcgctccaagctggactgtatgcacgaaccccccgttcagtccgaccgctgcgccttatccggtaactatcgtcttgagtccaacccggaaagacatgcaaaagcaccactggcagcagccactggtaattgatttagaggagttagtcttgaagtcatgcgccggttaaggctaaactgaaaggacaagttttggtgactgcgctcctccaagccagttacctcggttcaaagagttggtagctcagagaaccttcgaaaaaccgccctgcaaggcggttttttcgttttcagagcaagagattacgcgcagaccaaaacgatctcaagaagatcatcttattaagtctgacgctctattcaacaaagccgccgtccatgggtagggggcttcaaatcgtcctcgtgataccaattcggagcctgcttttttgtacaaacttgttgataatggcaattcaaggatcttcacctagatccttttaaattaaaaatgaagttttaaatcaatctaaagtatatatgagtaaacttggtctgacagttaccaatgcttaatcagtgaggcacctatctcagcgatctgtctatttcgttcatccatagttgcctgactccccgtcgtgtagataactacgatacgggagggcttaccatctggccccagtgctgcaatgataccgcgagagccacgctcaccggctccagatttatcagcaataaaccagccagccggaagggccgagcgcagaagtggtcctgcaactttatccgcctccatccagtctattaattgttgccgggaagctagagtaagtagttcgccagttaatagtttgcgcaacgttgttgccattgctacaggcatcgtggtgtcacgctcgtcgtttggtatggcttcattcagctccggttcccaacgatcaaggcgagttacatgatcccccatgttgtgcaaaaaagcggttagctccttcggtcctccgatcgttgtcagaagtaagttggccgcagtgttatcactcatggttatggcagcactgcataattctcttactgtcatgccatccgtaagatgcttttctgtgactggtgagtactcaaccaagtcattctgagaatagtgtatgcggcgaccgagttgctcttgcccggcgtcaatacgggataataccgcgccacatagcagaactttaaaagtgctcatcattggaaaacgttcttcggggcgaaaactctcaaggatcttaccgctgttgagatccagttcgatgtaacccactcgtgcacccaactgatcttcagcatcttttactttcaccagcgtttctgggtgagcaaaaacaggaaggcaaaatgccgcaaaaaagggaataagggcgacacggaaatgttgaatactcatactcttcctttttcaatattattgaagcatttatcagggttattgtctcatgagcggatacatatttgaatgtatttagaaaaataaacaaataggggttccgcgcacatttccccgaaaagtgccagatacctgaaacaaaacccatcgtacggccaaggaagtctccaataactgtgatccaccacaagcgccagggttttcccagtcacgacgttgtaaaacgacggccagtcatgcataatccgcacgcatctggaataaggaagtgccattccgcctgacctttgcctatgaggaccaaaacgaaaaaacaccctttcgggtgtcttttctggaatttggtaccgagaggctccatgattcagtatgacttgcctttggtcgaaaaaaaaagcccgcactgtcaggtgcgggcttttttctgtgtttccttattaggacccactttcacatttaagttgtttttctaatccgcatatgatcaattcaaggccgaataagaaggctggctctgcaccttggtgatcaaataattcgatagcttgtcgtaataatggcggcatactatcagtagtaggtgtttccctttcttctttagcgacttgatgctcttgatcttccaatacgcaacctaaagtaaaatgccccacagcgctgagtgcatataatgcattctctagtgaaaaaccttgttggcataaaaaggctaattgattttcgagagtttcatactgtttttctgtaggccgtgtacctaaatgtacttttgctccatcgcgatgacttagtaaagcacatctaaaacttttagcgttattacgtaaaaaatcttgccagctttccccttctaaagggcaaaagtgagtatggtgcctatctaacatctcaatggctaaggcgtcgagcaaagcccgcttattttttacatgccaatacaatgtaggctgctctacacctagcttctgggcgagtttacgggttgttaaaccttcgattccgacctcattaagcagctctaatgcgctgttaatcactttacttttatctaatctggacatattcaccaccctgaattgactctcttccgggcgctatcatgccataccgcgaaaggttttgcgccattcgatggcgcgccgccattgcttgtgcaatgtacatcagagattttgagacacaaccaattattgaaggcctccctaacggggggcctttttttgtttctggtcccccgcttaacgatcgttggctgttttcagcaggacgcactgacctccctatcagtgatagagattgacatccctatcagtgatagagatactgagcacagctgtcaccggatgtgctttccggtctgatgagtccgtgaggacgaaacagcctctacaaataattttgtttaaatcacacgggtaaggaggtatttaaatgaaaacactgtcccaagcacagtcgaagacgagtagccagcagttttctttcaccggtaattctagcgctaacgtgattatcggcaaccagaaactaactatcaacgacgtcgcccgcgttgctcggaacgggaccttagtaagcctgactaacaacactgatatacttcaaggcattcaggcgtcctgtgattatatcaataacgcagttgagtctggtgaaccaatttacggtgtgacctcaggcttcggcggtatggcgaacgttgctatcagccgtgaacaggcctccgaactgcaagagaatttggtatggtatgtgaaaactggtgctgggaacaaactccctttggcggacgtacgtgcagcaatgctgctgcgcgccaactcgcatatgcgtggcgcgtccggtatccgtctggagctgatcaaacgtatggaaatcttcttgaacgctggtgttactccgtacgtttatgaatttggatctatcggcgcttctggagatctggtcccgctgagctacattacgggttccctgattggccttgacccgagcttcaaggtggatttcaacggcaaagaaatggacgccccgaccgcgttacgccagttaaatctgtctcccctgacacttctgcctaaagaaggtctagctatggtcaatgggacctcagtcatgactggcatcgcagctaactgcgtatacgacacccagatcctgactgcgattgcaatgggtgttcacgctctggatatccaggccctgaacggcaccaaccagtctttccacccgtttatccataactctaagccgcacccaggtcagctgtgggcggctgatcagatgatatcattgctggctaactcgcaactggtacgggacgagctggacggcaaacatgattaccgcgaccacgagctgatccaggatcgttatagcctgcgttgccttccgcagtacctgggtccgattgtggacggtatctcacagatagcaaaacaaatcgaaattgaaattaactccgttactgataaccctctgattgacgtcgataaccaggcgtcgtaccacggcggaaatttcctgggtcagtatgttggcatgggtatggaccaccttcgctactatatcggcctgctggcgaaacacctggatgtgcagattgcgctgctagctagtcccgaatttagcaacggactgccgccatctttattgggcaaccgtgaacgtaaggttaacatgggtctgaaaggtttacaaatctgtggcaattccatcatgccgctgctgacgttctacggcaatagcatcgccgaccgctttccgacccatgcagagcaattcaaccagaatatcaactctcagggctacacctccgcaacgctggcgcgacgtagtgttgatatcttccaaaactacgttgcgattgccctgatgtttggcgtccaggctgtagacctgaggacttataaaaagactggccattacgatgcgcgtgcttgcctctctccggctaccgaacgcctgtattccgccgtgcgtcacgtagttggtcagaaacctacttcagatcgcccatacatctggaacgataacgagcagggtctggatgaacacatcgctcgcatctccgctgacattgccgctggcggagtaattgttcaagctgtacaggatatcctgccgtgcctgcactaaccggcttatcggtcagtttcacctgatttacgtaaaaacccgcttcggcgggtttttgcttttggaggggcagaaagatgaatgactgtccacgacgctatacccaaaagaaa

SEQ ID NO: 316 - DNA, 5122 bp, synthetic construct
  source 1..5122: mol_type = other DNA
aggctaggtggaggctcagtgatgataagtctgcgatggtggatgcatgtgtcatggtcatagctgtttcctgtgtgaaattgttatccgctcagagggcacaatcctattccgcgctatccgacaatctccaagacattaggtggagttcagttcggcgagcggaaatggcttacgaacggggcggagatttcctggaagatgccaggaagatacttaacagggaagtgagagggccgcggcaaagccgtttttccataggctccgcccccctgacaagcatcacgaaatctgacgctcaaatcagtggtggcgaaacccgacaggactataaagataccaggcgtttccccctggcggctccctcgtgcgctctcctgttcctgcctttcggtttaccggtgtcattccgctgttatggccgcgtttgtctcattccacgcctgacactcagttccgggtaggcagttcgctccaagctggactgtatgcacgaaccccccgttcagtccgaccgctgcgccttatccggtaactatcgtcttgagtccaacccggaaagacatgcaaaagcaccactggcagcagccactggtaattgatttagaggagttagtcttgaagtcatgcgccggttaaggctaaactgaaaggacaagttttggtgactgcgctcctccaagccagttacctcggttcaaagagttggtagctcagagaaccttcgaaaaaccgccctgcaaggcggttttttcgttttcagagcaagagattacgcgcagaccaaaacgatctcaagaagatcatcttattaagtctgacgctctattcaacaaagccgccgtccatgggtagggggcttcaaatcgtcctcgtgataccaattcggagcctgcttttttgtacaaacttgttgataatggcaattcaaggatcttcacctagatccttttaaattaaaaatgaagttttaaatcaatctaaagtatatatgagtaaacttggtctgacagttaccaatgcttaatcagtgaggcacctatctcagcgatctgtctatttcgttcatccatagttgcctgactccccgtcgtgtagataactacgatacgggagggcttaccatctggccccagtgctgcaatgataccgcgagagccacgctcaccggctccagatttatcagcaataaaccagccagccggaagggccgagcgcagaagtggtcctgcaactttatccgcctccatccagtctattaattgttgccgggaagctagagtaagtagttcgccagttaatagtttgcgcaacgttgttgccattgctacaggcatcgtggtgtcacgctcgtcgtttggtatggcttcattcagctccggttcccaacgatcaaggcgagttacatgatcccccatgttgtgcaaaaaagcggttagctccttcggtcctccgatcgttgtcagaagtaagttggccgcagtgttatcactcatggttatggcagcactgcataattctcttactgtcatgccatccgtaagatgcttttctgtgactggtgagtactcaaccaagtcattctgagaatagtgtatgcggcgaccgagttgctcttgcccggcgtcaatacgggataataccgcgccacatagcagaactttaaaagtgctcatcattggaaaacgttcttcggggcgaaaactctcaaggatcttaccgctgttgagatccagttcgatgtaacccactcgtgcacccaactgatcttcagcatcttttactttcaccagcgtttctgggtgagcaaaaacaggaaggcaaaatgccgcaaaaaagggaataagggcgacacggaaatgttgaatactcatactcttcctttttcaatattattgaagcatttatcagggttattgtctcatgagcggatacatatttgaatgtatttagaaaaataaacaaataggggttccgcgcacatttccccgaaaagtgccagatacctgaaacaaaacccatcgtacggccaaggaagtctccaataactgtgatccaccacaagcgccagggttttcccagtcacgacgttgtaaaacgacggccagtcatgcataatccgcacgcatctggaataaggaagtgccattccgcctgacctttgcctatgaggaccaaaacgaaaaaacaccctttcgggtgtcttttctggaatttggtaccgagaggctccatgattcagtatgacttgcctttggtcgaaaaaaaaagcccgcactgtcaggtgcgggcttttttctgtgtttccttattaggacccactttcacatttaagttgtttttctaatccgcatatgatcaattcaaggccgaataagaaggctggctctgcaccttggtgatcaaataattcgatagcttgtcgtaataatggcggcatactatcagtagtaggtgtttccctttcttctttagcgacttgatgctcttgatcttccaatacgcaacctaaagtaaaatgccccacagcgctgagtgcatataatgcattctctagtgaaaaaccttgttggcataaaaaggctaattgattttcgagagtttcatactgtttttctgtaggccgtgtacctaaatgtacttttgctccatcgcgatgacttagtaaagcacatctaaaacttttagcgttattacgtaaaaaatcttgccagctttccccttctaaagggcaaaagtgagtatggtgcctatctaacatctcaatggctaaggcgtcgagcaaagcccgcttattttttacatgccaatacaatgtaggctgctctacacctagcttctgggcgagtttacgggttgttaaaccttcgattccgacctcattaagcagctctaatgcgctgttaatcactttacttttatctaatctggacatattcaccaccctgaattgactctcttccgggcgctatcatgccataccgcgaaaggttttgcgccattcgatggcgcgccgccattgcttgtgcaatgtacatcagagattttgagacacaaccaattattgaaggcctccctaacggggggcctttttttgtttctggtcccccgcttaacgatcgttggctgttttcagcaggacgcactgacctccctatcagtgatagagattgacatccctatcagtgatagagatactgagcacagctgtcaccggatgtgctttccggtctgatgagtccgtgaggacgaaacagcctctacaaataattttgtttaaatcacacgggtaaggaggtatttaaatgaaaacactgtcccaagcacagtcgaagacgagtagccagcagttttctttcaccggtaattctagcgctaacgtgattatcggcaaccagaaactaactatcaacgacgtcgcccgcgttgctcggaacgggaccttagtaagcctgactaacaacactgatatacttcaaggcattcaggcgtcctgtgattatatcaataacgcagttgagtctggtgaaccaatttacggtgtgacctcaggcttcggcggtatggcgaacgttgctatcagccgtgaacaggcctccgaactgcaagagaatgccgtatggtatctgaaaactggtgctgggaacaaactccctttggcggacgtacgtgcagcaatgctgctgcgcgccaactcgcatatgcgtggcgcgtccggtatccgtctggagctgatcaaacgtatggaaatcttcttgaacgctggtgttactccgtacgtttatgaatttggatctatcggcgcttctggagatctggtcccgctgagctacattacgggttccctgattggccttgacccgagcttcaaggtggatttcaacggcaaagaaatggacgccccgaccgcgttacgccagttaaatctgtctcccctgacacttctgcctaaagaaggtctagctatgaataatgggacctcagtcatgactggcatcgcagctaactgcgtatacgacacccagatcctgactgcgattgcaatgggtgttcacgctctggatatccaggccctgaacggcaccaaccagtctttccacccgtttatccataactctaagccgcacccaggtcagctgtgggcggctgatcagatgatatcattgctggctaactcgcaactggtacgggacgagctggacggcaaacatgattaccgcgaccacgagctgatccaggatcgttatagcctgcgttgccttccgcagtacctgggtccgattgtggacggtatctcacagatagcaaaacaaatcgaaattgaaattaactccgttactgataaccctctgattgacgtcgataaccaggcgtcgtaccacggcggaaatttcctgggtcagtatgttggcatgggtatggaccaccttcgctactatatcggcctgctggcgaaacacctggatgtgcagattgcgctgctagctagtcccgaatttagcaacggactgccgccatctttattgggcaaccgtgaacgtaaggttaacatgggtctgaaaggtttacaaatctgtggcaattccatcatgccgctgctgacgttctacggcaatagcatcgccgaccgctttccgacccatgcagagcaattcaaccagaatatcaactctcagggctacacctccgcaacgctggcgcgacgtagtgttgatatcttccaaaactacgttgcgattgccctgatgtttggcgtccaggctgtagacctgaggacttataaaaagactggccattacgatgcgcgtgcttgcctctctccggctaccgaacgcctgtattccgccgtgcgtcacgtagttggtcagaaacctacttcagatcgcccatacatctggaacgataacgagcagggtctggatgaacacatcgctcgcatctccgctgacattgccgctggcggagtaattgttcaagctgtacaggatatcctgccgtgcctgcactaaccggcttatcggtcagtttcacctgatttacgtaaaaacccgcttcggcgggtttttgcttttggaggggcagaaagatgaatgactgtccacgacgctatacccaaaagaaa

SEQ ID NO: 317 - DNA, 5122 bp, synthetic construct
  source 1..5122: mol_type = other DNA
aggctaggtggaggctcagtgatgataagtctgcgatggtggatgcatgtgtcatggtcatagctgtttcctgtgtgaaattgttatccgctcagagggcacaatcctattccgcgctatccgacaatctccaagacattaggtggagttcagttcggcgagcggaaatggcttacgaacggggcggagatttcctggaagatgccaggaagatacttaacagggaagtgagagggccgcggcaaagccgtttttccataggctccgcccccctgacaagcatcacgaaatctgacgctcaaatcagtggtggcgaaacccgacaggactataaagataccaggcgtttccccctggcggctccctcgtgcgctctcctgttcctgcctttcggtttaccggtgtcattccgctgttatggccgcgtttgtctcattccacgcctgacactcagttccgggtaggcagttcgctccaagctggactgtatgcacgaaccccccgttcagtccgaccgctgcgccttatccggtaactatcgtcttgagtccaacccggaaagacatgcaaaagcaccactggcagcagccactggtaattgatttagaggagttagtcttgaagtcatgcgccggttaaggctaaactgaaaggacaagttttggtgactgcgctcctccaagccagttacctcggttcaaagagttggtagctcagagaaccttcgaaaaaccgccctgcaaggcggttttttcgttttcagagcaagagattacgcgcagaccaaaacgatctcaagaagatcatcttattaagtctgacgctctattcaacaaagccgccgtccatgggtagggggcttcaaatcgtcctcgtgataccaattcggagcctgcttttttgtacaaacttgttgataatggcaattcaaggatcttcacctagatccttttaaattaaaaatgaagttttaaatcaatctaaagtatatatgagtaaacttggtctgacagttaccaatgcttaatcagtgaggcacctatctcagcgatctgtctatttcgttcatccatagttgcctgactccccgtcgtgtagataactacgatacgggagggcttaccatctggccccagtgctgcaatgataccgcgagagccacgctcaccggctccagatttatcagcaataaaccagccagccggaagggccgagcgcagaagtggtcctgcaactttatccgcctccatccagtctattaattgttgccgggaagctagagtaagtagttcgccagttaatagtttgcgcaacgttgttgccattgctacaggcatcgtggtgtcacgctcgtcgtttggtatggcttcattcagctccggttcccaacgatcaaggcgagttacatgatcccccatgttgtgcaaaaaagcggttagctccttcggtcctccgatcgttgtcagaagtaagttggccgcagtgttatcactcatggttatggcagcactgcataattctcttactgtcatgccatccgtaagatgcttttctgtgactggtgagtactcaaccaagtcattctgagaatagtgtatgcggcgaccgagttgctcttgcccggcgtcaatacgggataataccgcgccacatagcagaactttaaaagtgctcatcattggaaaacgttcttcggggcgaaaactctcaaggatcttaccgctgttgagatccagttcgatgtaacccactcgtgcacccaactgatcttcagcatcttttactttcaccagcgtttctgggtgagcaaaaacaggaaggcaaaatgccgcaaaaaagggaataagggcgacacggaaatgttgaatactcatactcttcctttttcaatattattgaagcatttatcagggttattgtctcatgagcggatacatatttgaatgtatttagaaaaataaacaaataggggttccgcgcacatttccccgaaaagtgccagatacctgaaacaaaacccatcgtacggccaaggaagtctccaataactgtgatccaccacaagcgccagggttttcccagtcacgacgttgtaaaacgacggccagtcatgcataatccgcacgcatctggaataaggaagtgccattccgcctgacctttgcctatgaggaccaaaacgaaaaaacaccctttcgggtgtcttttctggaatttggtaccgagaggctccatgattcagtatgacttgcctttggtcgaaaaaaaaagcccgcactgtcaggtgcgggcttttttctgtgtttccttattaggacccactttcacatttaagttgtttttctaatccgcatatgatcaattcaaggccgaataagaaggctggctctgcaccttggtgatcaaataattcgatagcttgtcgtaataatggcggcatactatcagtagtaggtgtttccctttcttctttagcgacttgatgctcttgatcttccaatacgcaacctaaagtaaaatgccccacagcgctgagtgcatataatgcattctctagtgaaaaaccttgttggcataaaaaggctaattgattttcgagagtttcatactgtttttctgtaggccgtgtacctaaatgtacttttgctccatcgcgatgacttagtaaagcacatctaaaacttttagcgttattacgtaaaaaatcttgccagctttccccttctaaagggcaaaagtgagtatggtgcctatctaacatctcaatggctaaggcgtcgagcaaagcccgcttattttttacatgccaatacaatgtaggctgctctacacctagcttctgggcgagtttacgggttgttaaaccttcgattccgacctcattaagcagctctaatgcgctgttaatcactttacttttatctaatctggacatattcaccaccctgaattgactctcttccgggcgctatcatgccataccgcgaaaggttttgcgccattcgatggcgcgccgccattgcttgtgcaatgtacatcagagattttgagacacaaccaattattgaaggcctccctaacggggggcctttttttgtttctggtcccccgcttaacgatcgttggctgttttcagcaggacgcactgacctccctatcagtgatagagattgacatccctatcagtgatagagatactgagcacagctgtcaccggatgtgctttccggtctgatgagtccgtgaggacgaaacagcctctacaaataattttgtttaaatcacacgggtaaggaggtatttaaatgaaaacactgtcccaagcacagtcgaagacgagtagccagcagttttctttcaccggtaattctagcgctaacgtgattatcggcaaccagaaactaactatcaacgacgtcgcccgcgttgctcggaacgggaccttagtaagcctgactaacaacactgatatacttcaaggcattcaggcgtcctgtgattatatcaataacgcagttgagtctggtgaaccaatttacggtgtgacctcaggcttcggcggtatggcgaacgttgctatcagccgtgaacaggcctccgaactgcaagagaatttggtatggtcgaccaaaactggtgctgggaacaaactccctttggcggacgtacgtgcagcaatgctgctgcgcgccaactcgcatatgcgtggcgcgtccggtatccgtctggagctgatcaaacgtatggaaatcttcttgaacgctggtgttactccgtacgtttatgaatttggatctatcggcgcttctggagatctggtcccgctgagctacattacgggttccctgattggccttgacccgagcttcaaggtggatttcaacggcaaagaaatggacgccccgaccgcgttacgccagttaaatctgtctcccctgacacttctgcctaaagaagccattgctatgattaatgggacctcagtcatgactggcatcgcagctaactgcgtatacgacacccagatcctgactgcgattgcaatgggtgttcacgctctggatatccaggccctgaacggcaccaaccagtctttccacccgtttatccataactctaagccgcacccaggtcagctgtgggcggctgatcagatgatatcattgctggctaactcgcaactggtacgggacgagctggacggcaaacatgattaccgcgaccacgagctgatccaggatcgttatagcctgcgttgccttccgcagtacctgggtccgattgtggacggtatctcacagatagcaaaacaaatcgaaattgaaattaactccgttactgataaccctctgattgacgtcgataaccaggcgtcgtaccacggcggaaatttcctgggtcagtatgttggcatgggtatggaccaccttcgctactatatcggcctgctggcgaaacacctggatgtgcagattgcgctgctagctagtcccgaatttagcaacggactgccgccatctttattgggcaaccgtgaacgtaaggttaacatgggtctgaaaggtttacaaatctgtggcaattccatcatgccgctgctgacgttctacggcaatagcatcgccgaccgctttccgacccatgcagagcaattcaaccagaatatcaactctcagggctacacctccgcaacgctggcgcgacgtagtgttgatatcttccaaaactacgttgcgattgccctgatgtttggcgtccaggctgtagacctgaggacttataaaaagactggccattacgatgcgcgtgcttgcctctctccggctaccgaacgcctgtattccgccgtgcgtcacgtagttggtcagaaacctacttcagatcgcccatacatctggaacgataacgagcagggtctggatgaacacatcgctcgcatctccgctgacattgccgctggcggagtaattgttcaagctgtacaggatatcctgccgtgcctgcactaaccggcttatcggtcagtttcacctgatttacgtaaaaacccgcttcggcgggtttttgcttttggaggggcagaaagatgaatgactgtccacgacgctatacccaaaagaaa

SEQ ID NO: 318 - DNA, 5122 bp, synthetic construct
  source 1..5122: mol_type = other DNA
aggctaggtggaggctcagtgatgataagtctgcgatggtggatgcatgtgtcatggtcatagctgtttcctgtgtgaaattgttatccgctcagagggcacaatcctattccgcgctatccgacaatctccaagacattaggtggagttcagttcggcgagcggaaatggcttacgaacggggcggagatttcctggaagatgccaggaagatacttaacagggaagtgagagggccgcggcaaagccgtttttccataggctccgcccccctgacaagcatcacgaaatctgacgctcaaatcagtggtggcgaaacccgacaggactataaagataccaggcgtttccccctggcggctccctcgtgcgctctcctgttcctgcctttcggtttaccggtgtcattccgctgttatggccgcgtttgtctcattccacgcctgacactcagttccgggtaggcagttcgctccaagctggactgtatgcacgaaccccccgttcagtccgaccgctgcgccttatccggtaactatcgtcttgagtccaacccggaaagacatgcaaaagcaccactggcagcagccactggtaattgatttagaggagttagtcttgaagtcatgcgccggttaaggctaaactgaaaggacaagttttggtgactgcgctcctccaagccagttacctcggttcaaagagttggtagctcagagaaccttcgaaaaaccgccctgcaaggcggttttttcgttttcagagcaagagattacgcgcagaccaaaacgatctcaagaagatcatcttattaagtctgacgctctattcaacaaagccgccgtccatgggtagggggcttcaaatcgtcctcgtgataccaattcggagcctgcttttttgtacaaacttgttgataatggcaattcaaggatcttcacctagatccttttaaattaaaaatgaagttttaaatcaatctaaagtatatatgagtaaacttggtctgacagttaccaatgcttaatcagtgaggcacctatctcagcgatctgtctatttcgttcatccatagttgcctgactccccgtcgtgtagataactacgatacgggagggcttaccatctggccccagtgctgcaatgataccgcgagagccacgctcaccggctccagatttatcagcaataaaccagccagccggaagggccgagcgcagaagtggtcctgcaactttatccgcctccatccagtctattaattgttgccgggaagctagagtaagtagttcgccagttaatagtttgcgcaacgttgttgccattgctacaggcatcgtggtgtcacgctcgtcgtttggtatggcttcattcagctccggttcccaacgatcaaggcgagttacatgatcccccatgttgtgcaaaaaagcggttagctccttcggtcctccgatcgttgtcagaagtaagttggccgcagtgttatcactcatggttatggcagcactgcataattctcttactgtcatgccatccgtaagatgcttttctgtgactggtgagtactcaaccaagtcattctgagaatagtgtatgcggcgaccgagttgctcttgcccggcgtcaatacgggataataccgcgccacatagcagaactttaaaagtgctcatcattggaaaacgttcttcggggcgaaaactctcaaggatcttaccgctgttgagatccagttcgatgtaacccactcgtgcacccaactgatcttcagcatcttttactttcaccagcgtttctgggtgagcaaaaacaggaaggcaaaatgccgcaaaaaagggaataagggcgacacggaaatgttgaatactcatactcttcctttttcaatattattgaagcatttatcagggttattgtctcatgagcggatacatatttgaatgtatttagaaaaataaacaaataggggttccgcgcacatttccccgaaaagtgccagatacctgaaacaaaacccatcgtacggccaaggaagtctccaataactgtgatccaccacaagcgccagggttttcccagtcacgacgttgtaaaacgacggccagtcatgcataatccgcacgcatctggaataaggaagtgccattccgcctgacctttgcctatgaggaccaaaacgaaaaaacaccctttcgggtgtcttttctggaatttggtaccgagaggctccatgattcagtatgacttgcctttggtcgaaaaaaaaagcccgcactgtcaggtgcgggcttttttctgtgtttccttattaggacccactttcacatttaagttgtttttctaatccgcatatgatcaattcaaggccgaataagaaggctggctctgcaccttggtgatcaaataattcgatagcttgtcgtaataatggcggcatactatcagtagtaggtgtttccctttcttctttagcgacttgatgctcttgatcttccaatacgcaacctaaagtaaaatgccccacagcgctgagtgcatataatgcattctctagtgaaaaaccttgttggcataaaaaggctaattgattttcgagagtttcatactgtttttctgtaggccgtgtacctaaatgtacttttgctccatcgcgatgacttagtaaagcacatctaaaacttttagcgttattacgtaaaaaatcttgccagctttccccttctaaagggcaaaagtgagtatggtgcctatctaacatctcaatggctaaggcgtcgagcaaagcccgcttattttttacatgccaatacaatgtaggctgctctacacctagcttctgggcgagtttacgggttgttaaaccttcgattccgacctcattaagcagctctaatgcgctgttaatcactttacttttatctaatctggacatattcaccaccctgaattgactctcttccgggcgctatcatgccataccgcgaaaggttttgcgccattcgatggcgcgccgccattgcttgtgcaatgtacatcagagattttgagacacaaccaattattgaaggcctccctaacggggggcctttttttgtttctggtcccccgcttaacgatcgttggctgttttcagcaggacgcactgacctccctatcagtgatagagattgacatccctatcagtgatagagatactgagcacagctgtcaccggatgtgctttccggtctgatgagtccgtgaggacgaaacagcctctacaaataattttgtttaaatcacacgggtaaggaggtatttaaatgaaaacactgtcccaagcacagtcgaagacgagtagccagcagttttctttcaccggtaattctagcgctaacgtgattatcggcaaccagaaactaactatcaacgacgtcgcccgcgttgctcggaacgggaccttagtaagcctgactaacaacactgatatacttcaaggcattcaggcgtcctgtgattatatcaataacgcagttgagtctggtgaaccaatttacggtgtgacctcaggcttcggcggtatggcgaacgttgctatcagccgtgaacaggcctccgaactgcaacacaatgcggtatggcatacgaaaactggtgctgggaacaaactccctttggcggacgtacgtgcagcaatgctgctgcgcgccaactcgcatatgcgtggcgcgtccggtatccgtctggagctgatcaaacgtatggaaatcttcttgaacgctggtgttactccgtacgtttatgaatttggatctatcggcgcttctggagatctggtcccgctgagctacattacgggttccctgattggccttgacccgagcttcaaggtggatttcaacggcaaagaaatggacgccccgaccgcgttacgccagttaaatctgtctcccctgacacttctgcctaaagaatcgattgctatgctcaatgggacctcagtcatgactggcatcgcagctaactgcgtatacgacacccagatcctgactgcgattgcaatgggtgttcacgctctggatatccaggccctgaacggcaccaaccagtctttccacccgtttatccataactctaagccgcacccaggtcagctgtgggcggctgatcagatgatatcattgctggctaactcgcaactggtacgggacgagctggacggcaaacatgattaccgcgaccacgagctgatccaggatcgttatagcctgcgttgccttccgcagtacctgggtccgattgtggacggtatctcacagatagcaaaacaaatcgaaattgaaattaactccgttactgataaccctctgattgacgtcgataaccaggcgtcgtaccacggcggaaatttcctgggtcagtatgttggcatgggtatggaccaccttcgctactatatcggcctgctggcgaaacacctggatgtgcagattgcgctgctagctagtcccgaatttagcaacggactgccgccatctttattgggcaaccgtgaacgtaaggttaacatgggtctgaaaggtttacaaatctgtggcaattccatcatgccgctgctgacgttctacggcaatagcatcgccgaccgctttccgacccatgcagagcaattcaaccagaatatcaactctcagggctacacctccgcaacgctggcgcgacgtagtgttgatatcttccaaaactacgttgcgattgccctgatgtttggcgtccaggctgtagacctgaggacttataaaaagactggccattacgatgcgcgtgcttgcctctctccggctaccgaacgcctgtattccgccgtgcgtcacgtagttggtcagaaacctacttcagatcgcccatacatctggaacgataacgagcagggtctggatgaacacatcgctcgcatctccgctgacattgccgctggcggagtaattgttcaagctgtacaggatatcctgccgtgcctgcactaaccggcttatcggtcagtttcacctgatttacgtaaaaacccgcttcggcgggtttttgcttttggaggggcagaaagatgaatgactgtccacgacgctatacccaaaagaaa

SEQ ID NO: 319 - DNA, 5122 bp, synthetic construct
  source 1..5122: mol_type = other DNA
aggctaggtggaggctcagtgatgataagtctgcgatggtggatgcatgtgtcatggtcatagctgtttcctgtgtgaaattgttatccgctcagagggcacaatcctattccgcgctatccgacaatctccaagacattaggtggagttcagttcggcgagcggaaatggcttacgaacggggcggagatttcctggaagatgccaggaagatacttaacagggaagtgagagggccgcggcaaagccgtttttccataggctccgcccccctgacaagcatcacgaaatctgacgctcaaatcagtggtggcgaaacccgacaggactataaagataccaggcgtttccccctggcggctccctcgtgcgctctcctgttcctgcctttcggtttaccggtgtcattccgctgttatggccgcgtttgtctcattccacgcctgacactcagttccgggtaggcagttcgctccaagctggactgtatgcacgaaccccccgttcagtccgaccgctgcgccttatccggtaactatcgtcttgagtccaacccggaaagacatgcaaaagcaccactggcagcagccactggtaattgatttagaggagttagtcttgaagtcatgcgccggttaaggctaaactgaaaggacaagttttggtgactgcgctcctccaagccagttacctcggttcaaagagttggtagctcagagaaccttcgaaaaaccgccctgcaaggcggttttttcgttttcagagcaagagattacgcgcagaccaaaacgatctcaagaagatcatcttattaagtctgacgctctattcaacaaagccgccgtccatgggtagggggcttcaaatcgtcctcgtgataccaattcggagcctgcttttttgtacaaacttgttgataatggcaattcaaggatcttcacctagatccttttaaattaaaaatgaagttttaaatcaatctaaagtatatatgagtaaacttggtctgacagttaccaatgcttaatcagtgaggcacctatctcagcgatctgtctatttcgttcatccatagttgcctgactccccgtcgtgtagataactacgatacgggagggcttaccatctggccccagtgctgcaatgataccgcgagagccacgctcaccggctccagatttatcagcaataaaccagccagccggaagggccgagcgcagaagtggtcctgcaactttatccgcctccatccagtctattaattgttgccgggaagctagagtaagtagttcgccagttaatagtttgcgcaacgttgttgccattgctacaggcatcgtggtgtcacgctcgtcgtttggtatggcttcattcagctccggttcccaacgatcaaggcgagttacatgatcccccatgttgtgcaaaaaagcggttagctccttcggtcctccgatcgttgtcagaagtaagttggccgcagtgttatcactcatggttatggcagcactgcataattctcttactgtcatgccatccgtaagatgcttttctgtgactggtgagtactcaaccaagtcattctgagaatagtgtatgcggcgaccgagttgctcttgcccggcgtcaatacgggataataccgcgccacatagcagaactttaaaagtgctcatcattggaaaacgttcttcggggcgaaaactctcaaggatcttaccgctgttgagatccagttcgatgtaacccactcgtgcacccaactgatcttcagcatcttttactttcaccagcgtttctgggtgagcaaaaacaggaaggcaaaatgccgcaaaaaagggaataagggcgacacggaaatgttgaatactcatactcttcctttttcaatattattgaagcatttatcagggttattgtctcatgagcggatacatatttgaatgtatttagaaaaataaacaaataggggttccgcgcacatttccccgaaaagtgccagatacctgaaacaaaacccatcgtacggccaaggaagtctccaataactgtgatccaccacaagcgccagggttttcccagtcacgacgttgtaaaacgacggccagtcatgcataatccgcacgcatctggaataaggaagtgccattccgcctgacctttgcctatgaggaccaaaacgaaaaaacaccctttcgggtgtcttttctggaatttggtaccgagaggctccatgattcagtatgacttgcctttggtcgaaaaaaaaagcccgcactgtcaggtgcgggcttttttctgtgtttccttattaggacccactttcacatttaagttgtttttctaatccgcatatgatcaattcaaggccgaataagaaggctggctctgcaccttggtgatcaaataattcgatagcttgtcgtaataatggcggcatactatcagtagtaggtgtttccctttcttctttagcgacttgatgctcttgatcttccaatacgcaacctaaagtaaaatgccccacagcgctgagtgcatataatgcattctctagtgaaaaaccttgttggcataaaaaggctaattgattttcgagagtttcatactgtttttctgtaggccgtgtacctaaatgtacttttgctccatcgcgatgacttagtaaagcacatctaaaacttttagcgttattacgtaaaaaatcttgccagctttccccttctaaagggcaaaagtgagtatggtgcctatctaacatctcaatggctaaggcgtcgagcaaagcccgcttattttttacatgccaatacaatgtaggctgctctacacctagcttctgggcgagtttacgggttgttaaaccttcgattccgacctcattaagcagctctaatgcgctgttaatcactttacttttatctaatctggacatattcaccaccctgaattgactctcttccgggcgctatcatgccataccgcgaaaggttttgcgccattcgatggcgcgccgccattgcttgtgcaatgtacatcagagattttgagacacaaccaattattgaaggcctccctaacggggggcctttttttgtttctggtcccccgcttaacgatcgttggctgttttcagcaggacgcactgacctccctatcagtgatagagattgacatccctatcagtgatagagatactgagcacagctgtcaccggatgtgctttccggtctgatgagtccgtgaggacgaaacagcctctacaaataattttgtttaaatcacacgggtaaggaggtatttaaatgaaaacactgtcccaagcacagtcgaagacgagtagccagcagttttctttcaccggtaattctagcgctaacgtgattatcggcaaccagaaactaactatcaacgacgtcgcccgcgttgctcggaacgggaccttagtaagcctgactaacaacactgatatacttcaaggcattcaggcgtcctgtgattatatcaataacgcagttgagtctggtgaaccaatttacggtgtgacctcaggcttcggcggtatggcgaacgttgctatcagccgtgaacaggcctccgaactgcaacataatatggtatggcacctgaaaactggtgctgggaacaaactccctttggcggacgtacgtgcagcaatgctgctgcgcgccaactcgcatatgcgtggcgcgtccggtatccgtctggagctgatcaaacgtatggaaatcttcttgaacgctggtgttactccgtacgtttatgaatttggatctatcggcgcttctggagatctggtcccgctgagctacattacgggttccctgattggccttgacccgagcttcaaggtggatttcaacggcaaagaaatggacgccccgaccgcgttacgccagttaaatctgtctcccctgacacttctgcctaaagaaggtattgctatgcttaatgggacctcagtcatgactggcatcgcagctaactgcgtatacgacacccagatcctgactgcgattgcaatgggtgttcacgctctggatatccaggccctgaacggcaccaaccagtctttccacccgtttatccataactctaagccgcacccaggtcagctgtgggcggctgatcagatgatatcattgctggctaactcgcaactggtacgggacgagctggacggcaaacatgattaccgcgaccacgagctgatccaggatcgttatagcctgcgttgccttccgcagtacctgggtccgattgtggacggtatctcacagatagcaaaacaaatcgaaattgaaattaactccgttactgataaccctctgattgacgtcgataaccaggcgtcgtaccacggcggaaatttcctgggtcagtatgttggcatgggtatggaccaccttcgctactatatcggcctgctggcgaaacacctggatgtgcagattgcgctgctagctagtcccgaatttagcaacggactgccgccatctttattgggcaaccgtgaacgtaaggttaacatgggtctgaaaggtttacaaatctgtggcaattccatcatgccgctgctgacgttctacggcaatagcatcgccgaccgctttccgacccatgcagagcaattcaaccagaatatcaactctcagggctacacctccgcaacgctggcgcgacgtagtgttgatatcttccaaaactacgttgcgattgccctgatgtttggcgtccaggctgtagacctgaggacttataaaaagactggccattacgatgcgcgtgcttgcctctctccggctaccgaacgcctgtattccgccgtgcgtcacgtagttggtcagaaacctacttcagatcgcccatacatctggaacgataacgagcagggtctggatgaacacatcgctcgcatctccgctgacattgccgctggcggagtaattgttcaagctgtacaggatatcctgccgtgcctgcactaaccggcttatcggtcagtttcacctgatttacgtaaaaacccgcttcggcgggtttttgcttttggaggggcagaaagatgaatgactgtccacgacgctatacccaaaagaaa

SEQ ID NO: 320 - DNA, 5122 bp, synthetic construct
  source 1..5122: mol_type = other DNA
aggctaggtggaggctcagtgatgataagtctgcgatggtggatgcatgtgtcatggtcatagctgtttcctgtgtgaaattgttatccgctcagagggcacaatcctattccgcgctatccgacaatctccaagacattaggtggagttcagttcggcgagcggaaatggcttacgaacggggcggagatttcctggaagatgccaggaagatacttaacagggaagtgagagggccgcggcaaagccgtttttccataggctccgcccccctgacaagcatcacgaaatctgacgctcaaatcagtggtggcgaaacccgacaggactataaagataccaggcgtttccccctggcggctccctcgtgcgctctcctgttcctgcctttcggtttaccggtgtcattccgctgttatggccgcgtttgtctcattccacgcctgacactcagttccgggtaggcagttcgctccaagctggactgtatgcacgaaccccccgttcagtccgaccgctgcgccttatccggtaactatcgtcttgagtccaacccggaaagacatgcaaaagcaccactggcagcagccactggtaattgatttagaggagttagtcttgaagtcatgcgccggttaaggctaaactgaaaggacaagttttggtgactgcgctcctccaagccagttacctcggttcaaagagttggtagctcagagaaccttcgaaaaaccgccctgcaaggcggttttttcgttttcagagcaagagattacgcgcagaccaaaacgatctcaagaagatcatcttattaagtctgacgctctattcaacaaagccgccgtccatgggtagggggcttcaaatcgtcctcgtgataccaattcggagcctgcttttttgtacaaacttgttgataatggcaattcaaggatcttcacctagatccttttaaattaaaaatgaagttttaaatcaatctaaagtatatatgagtaaacttggtctgacagttaccaatgcttaatcagtgaggcacctatctcagcgatctgtctatttcgttcatccatagttgcctgactccccgtcgtgtagataactacgatacgggagggcttaccatctggccccagtgctgcaatgataccgcgagagccacgctcaccggctccagatttatcagcaataaaccagccagccggaagggccgagcgcagaagtggtcctgcaactttatccgcctccatccagtctattaattgttgccgggaagctagagtaagtagttcgccagttaatagtttgcgcaacgttgttgccattgctacaggcatcgtggtgtcacgctcgtcgtttggtatggcttcattcagctccggttcccaacgatcaaggcgagttacatgatcccccatgttgtgcaaaaaagcggttagctccttcggtcctccgatcgttgtcagaagtaagttggccgcagtgttatcactcatggttatggcagcactgcataattctcttactgtcatgccatccgtaagatgcttttctgtgactggtgagtactcaaccaagtcattctgagaatagtgtatgcggcgaccgagttgctcttgcccggcgtcaatacgggataataccgcgccacatagcagaactttaaaagtgctcatcattggaaaacgttcttcggggcgaaaactctcaaggatcttaccgctgttgagatccagttcgatgtaacccactcgtgcacccaactgatcttcagcatcttttactttcaccagcgtttctgggtgagcaaaaacaggaaggcaaaatgccgcaaaaaagggaataagggcgacacggaaatgttgaatactcatactcttcctttttcaatattattgaagcatttatcagggttattgtctcatgagcggatacatatttgaatgtatttagaaaaataaacaaataggggttccgcgcacatttccccgaaaagtgccagatacctgaaacaaaacccatcgtacggccaaggaagtctccaataactgtgatccaccacaagcgccagggttttcccagtcacgacgttgtaaaacgacggccagtcatgcataatccgcacgcatctggaataaggaagtgccattccgcctgacctttgcctatgaggaccaaaacgaaaaaacaccctttcgggtgtcttttctggaatttggtaccgagaggctccatgattcagtatgacttgcctttggtcgaaaaaaaaagcccgcactgtcaggtgcgggcttttttctgtgtttccttattaggacccactttcacatttaagttgtttttctaatccgcatatgatcaattcaaggccgaataagaaggctggctctgcaccttggtgatcaaataattcgatagcttgtcgtaataatggcggcatactatcagtagtaggtgtttccctttcttctttagcgacttgatgctcttgatcttccaatacgcaacctaaagtaaaatgccccacagcgctgagtgcatataatgcattctctagtgaaaaaccttgttggcataaaaaggctaattgattttcgagagtttcatactgtttttctgtaggccgtgtacctaaatgtacttttgctccatcgcgatgacttagtaaagcacatctaaaacttttagcgttattacgtaaaaaatcttgccagctttccccttctaaagggcaaaagtgagtatggtgcctatctaacatctcaatggctaaggcgtcgagcaaagcccgcttattttttacatgccaatacaatgtaggctgctctacacctagcttctgggcgagtttacgggttgttaaaccttcgattccgacctcattaagcagctctaatgcgctgttaatcactttacttttatctaatctggacatattcaccaccctgaattgactctcttccgggcgctatcatgccataccgcgaaaggttttgcgccattcgatggcgcgccgccattgcttgtgcaatgtacatcagagattttgagacacaaccaattattgaaggcctccctaacggggggcctttttttgtttctggtcccccgcttaacgatcgttggctgttttcagcaggacgcactgacctccctatcagtgatagagattgacatccctatcagtgatagagatactgagcacagctgtcaccggatgtgctttccggtctgatgagtccgtgaggacgaaacagcctctacaaataattttgtttaaatcacacgggtaaggaggtatttaaatgaaaacactgtcccaagcacagtcgaagacgagtagccagcagttttctttcaccggtaattctagcgctaacgtgattatcggcaaccagaaactaactatcaacgacgtcgcccgcgttgctcggaacgggaccttagtaagcctgactaacaacactgatatacttcaaggcattcaggcgtcctgtgattatatcaataacgcagttgagtctggtgaaccaatttacggtgtgacctcaggcttcggcggtatggcgaacgttgctatcagccgtgaacaggcctccgaactgcaagagaatttggtatggtatatgaaaactggtgctgggaacaaactccctttggcggacgtacgtgcagcaatgctgctgcgcgccaactcgcatatgcgtggcgcgtccggtatccgtctggagctgatcaaacgtatggaaatcttcttgaacgctggtgttactccgtacgtttatgaatttggatctatcggcgcttctggagatctggtcccgctgagctacattacgggttccctgattggccttgacccgagcttcaaggtggatttcaacggcaaagaaatggacgccccgaccgcgttacgccagttaaatctgtctcccctgacacttctgcctaaagaagcgctagctatgattaatgggacctcagtcatgactggcatcgcagctaactgcgtatacgacacccagatcctgactgcgattgcaatgggtgttcacgctctggatatccaggccctgaacggcaccaaccagtctttccacccgtttatccataactctaagccgcacccaggtcagctgtgggcggctgatcagatgatatcattgctggctaactcgcaactggtacgggacgagctggacggcaaacatgattaccgcgaccacgagctgatccaggatcgttatagcctgcgttgccttccgcagtacctgggtccgattgtggacggtatctcacagatagcaaaacaaatcgaaattgaaattaactccgttactgataaccctctgattgacgtcgataaccaggcgtcgtaccacggcggaaatttcctgggtcagtatgttggcatgggtatggaccaccttcgctactatatcggcctgctggcgaaacacctggatgtgcagattgcgctgctagctagtcccgaatttagcaacggactgccgccatctttattgggcaaccgtgaacgtaaggttaacatgggtctgaaaggtttacaaatctgtggcaattccatcatgccgctgctgacgttctacggcaatagcatcgccgaccgctttccgacccatgcagagcaattcaaccagaatatcaactctcagggctacacctccgcaacgctggcgcgacgtagtgttgatatcttccaaaactacgttgcgattgccctgatgtttggcgtccaggctgtagacctgaggacttataaaaagactggccattacgatgcgcgtgcttgcctctctccggctaccgaacgcctgtattccgccgtgcgtcacgtagttggtcagaaacctacttcagatcgcccatacatctggaacgataacgagcagggtctggatgaacacatcgctcgcatctccgctgacattgccgctggcggagtaattgttcaagctgtacaggatatcctgccgtgcctgcactaaccggcttatcggtcagtttcacctgatttacgtaaaaacccgcttcggcgggtttttgcttttggaggggcagaaagatgaatgactgtccacgacgctatacccaaaagaaa

SEQ ID NO: 321 - DNA, 5122 bp, synthetic construct
  source 1..5122: mol_type = other DNA
aggctaggtggaggctcagtgatgataagtctgcgatggtggatgcatgtgtcatggtcatagctgtttcctgtgtgaaattgttatccgctcagagggcacaatcctattccgcgctatccgacaatctccaagacattaggtggagttcagttcggcgagcggaaatggcttacgaacggggcggagatttcctggaagatgccaggaagatacttaacagggaagtgagagggccgcggcaaagccgtttttccataggctccgcccccctgacaagcatcacgaaatctgacgctcaaatcagtggtggcgaaacccgacaggactataaagataccaggcgtttccccctggcggctccctcgtgcgctctcctgttcctgcctttcggtttaccggtgtcattccgctgttatggccgcgtttgtctcattccacgcctgacactcagttccgggtaggcagttcgctccaagctggactgtatgcacgaaccccccgttcagtccgaccgctgcgccttatccggtaactatcgtcttgagtccaacccggaaagacatgcaaaagcaccactggcagcagccactggtaattgatttagaggagttagtcttgaagtcatgcgccggttaaggctaaactgaaaggacaagttttggtgactgcgctcctccaagccagttacctcggttcaaagagttggtagctcagagaaccttcgaaaaaccgccctgcaaggcggttttttcgttttcagagcaagagattacgcgcagaccaaaacgatctcaagaagatcatcttattaagtctgacgctctattcaacaaagccgccgtccatgggtagggggcttcaaatcgtcctcgtgataccaattcggagcctgcttttttgtacaaacttgttgataatggcaattcaaggatcttcacctagatccttttaaattaaaaatgaagttttaaatcaatctaaagtatatatgagtaaacttggtctgacagttaccaatgcttaatcagtgaggcacctatctcagcgatctgtctatttcgttcatccatagttgcctgactccccgtcgtgtagataactacgatacgggagggcttaccatctggccccagtgctgcaatgataccgcgagagccacgctcaccggctccagatttatcagcaataaaccagccagccggaagggccgagcgcagaagtggtcctgcaactttatccgcctccatccagtctattaattgttgccgggaagctagagtaagtagttcgccagttaatagtttgcgcaacgttgttgccattgctacaggcatcgtggtgtcacgctcgtcgtttggtatggcttcattcagctccggttcccaacgatcaaggcgagttacatgatcccccatgttgtgcaaaaaagcggttagctccttcggtcctccgatcgttgtcagaagtaagttggccgcagtgttatcactcatggttatggcagcactgcataattctcttactgtcatgccatccgtaagatgcttttctgtgactggtgagtactcaaccaagtcattctgagaatagtgtatgcggcgaccgagttgctcttgcccggcgtcaatacgggataataccgcgccacatagcagaactttaaaagtgctcatcattggaaaacgttcttcggggcgaaaactctcaaggatcttaccgctgttgagatccagttcgatgtaacccactcgtgcacccaactgatcttcagcatcttttactttcaccagcgtttctgggtgagcaaaaacaggaaggcaaaatgccgcaaaaaagggaataagggcgacacggaaatgttgaatactcatactcttcctttttcaatattattgaagcatttatcagggttattgtctcatgagcggatacatatttgaatgtatttagaaaaataaacaaataggggttccgcgcacatttccccgaaaagtgccagatacctgaaacaaaacccatcgtacggccaaggaagtctccaataactgtgatccaccacaagcgccagggttttcccagtcacgacgttgtaaaacgacggccagtcatgcataatccgcacgcatctggaataaggaagtgccattccgcctgacctttgcctatgaggaccaaaacgaaaaaacaccctttcgggtgtcttttctggaatttggtaccgagaggctccatgattcagtatgacttgcctttggtcgaaaaaaaaagcccgcactgtcaggtgcgggcttttttctgtgtttccttattaggacccactttcacatttaagttgtttttctaatccgcatatgatcaattcaaggccgaataagaaggctggctctgcaccttggtgatcaaataattcgatagcttgtcgtaataatggcggcatactatcagtagtaggtgtttccctttcttctttagcgacttgatgctcttgatcttccaatacgcaacctaaagtaaaatgccccacagcgctgagtgcatataatgcattctctagtgaaaaaccttgttggcataaaaaggctaattgattttcgagagtttcatactgtttttctgtaggccgtgtacctaaatgtacttttgctccatcgcgatgacttagtaaagcacatctaaaacttttagcgttattacgtaaaaaatcttgccagctttccccttctaaagggcaaaagtgagtatggtgcctatctaacatctcaatggctaaggcgtcgagcaaagcccgcttattttttacatgccaatacaatgtaggctgctctacacctagcttctgggcgagtttacgggttgttaaaccttcgattccgacctcattaagcagctctaatgcgctgttaatcactttacttttatctaatctggacatattcaccaccctgaattgactctcttccgggcgctatcatgccataccgcgaaaggttttgcgccattcgatggcgcgccgccattgcttgtgcaatgtacatcagagattttgagacacaaccaattattgaaggcctccctaacggggggcctttttttgtttctggtcccccgcttaacgatcgttggctgttttcagcaggacgcactgacctccctatcagtgatagagattgacatccctatcagtgatagagatactgagcacagctgtcaccggatgtgctttccggtctgatgagtccgtgaggacgaaacagcctctacaaataattttgtttaaatcacacgggtaaggaggtatttaaatgaaaacactgtcccaagcacagtcgaagacgagtagccagcagttttctttcaccggtaattctagcgctaacgtgattatcggcaaccagaaactaactatcaacgacgtcgcccgcgttgctcggaacgggaccttagtaagcctgactaacaacactgatatacttcaaggcattcaggcgtcctgtgattatatcaataacgcagttgagtctggtgaaccaatttacggtgtgacctcaggcttcggcggtatggcgaacgttgctatcagccgtgaacaggcctccgaactgcaagagaatatggtatggcatgtcaaaactggtgctgggaacaaactccctttggcggacgtacgtgcagcaatgctgctgcgcgccaactcgcatatgcgtggcgcgtccggtatccgtctggagctgatcaaacgtatggaaatcttcttgaacgctggtgttactccgtacgtttatgaatttggatctatcggcgcttctggagatctggtcccgctgagctacattacgggttccctgattggccttgacccgagcttcaaggtggatttcaacggcaaagaaatggacgccccgaccgcgttacgccagttaaatctgtctcccctgacacttctgcctaaagaaggtattgctatgctcaatgggacctcagtcatgactggcatcgcagctaactgcgtatacgacacccagatcctgactgcgattgcaatgggtgttcacgctctggatatccaggccctgaacggcaccaaccagtctttccacccgtttatccataactctaagccgcacccaggtcagctgtgggcggctgatcagatgatatcattgctggctaactcgcaactggtacgggacgagctggacggcaaacatgattaccgcgaccacgagctgatccaggatcgttatagcctgcgttgccttccgcagtacctgggtccgattgtggacggtatctcacagatagcaaaacaaatcgaaattgaaattaactccgttactgataaccctctgattgacgtcgataaccaggcgtcgtaccacggcggaaatttcctgggtcagtatgttggcatgggtatggaccaccttcgctactatatcggcctgctggcgaaacacctggatgtgcagattgcgctgctagctagtcccgaatttagcaacggactgccgccatctttattgggcaaccgtgaacgtaaggttaacatgggtctgaaaggtttacaaatctgtggcaattccatcatgccgctgctgacgttctacggcaatagcatcgccgaccgctttccgacccatgcagagcaattcaaccagaatatcaactctcagggctacacctccgcaacgctggcgcgacgtagtgttgatatcttccaaaactacgttgcgattgccctgatgtttggcgtccaggctgtagacctgaggacttataaaaagactggccattacgatgcgcgtgcttgcctctctccggctaccgaacgcctgtattccgccgtgcgtcacgtagttggtcagaaacctacttcagatcgcccatacatctggaacgataacgagcagggtctggatgaacacatcgctcgcatctccgctgacattgccgctggcggagtaattgttcaagctgtacaggatatcctgccgtgcctgcactaaccggcttatcggtcagtttcacctgatttacgtaaaaacccgcttcggcgggtttttgcttttggaggggcagaaagatgaatgactgtccacgacgctatacccaaaagaaa

SEQ ID NO: 322 - DNA, 5122 bp, synthetic construct
  source 1..5122: mol_type = other DNA
aggctaggtggaggctcagtgatgataagtctgcgatggtggatgcatgtgtcatggtcatagctgtttcctgtgtgaaattgttatccgctcagagggcacaatcctattccgcgctatccgacaatctccaagacattaggtggagttcagttcggcgagcggaaatggcttacgaacggggcggagatttcctggaagatgccaggaagatacttaacagggaagtgagagggccgcggcaaagccgtttttccataggctccgcccccctgacaagcatcacgaaatctgacgctcaaatcagtggtggcgaaacccgacaggactataaagataccaggcgtttccccctggcggctccctcgtgcgctctcctgttcctgcctttcggtttaccggtgtcattccgctgttatggccgcgtttgtctcattccacgcctgacactcagttccgggtaggcagttcgctccaagctggactgtatgcacgaaccccccgttcagtccgaccgctgcgccttatccggtaactatcgtcttgagtccaacccggaaagacatgcaaaagcaccactggcagcagccactggtaattgatttagaggagttagtcttgaagtcatgcgccggttaaggctaaactgaaaggacaagttttggtgactgcgctcctccaagccagttacctcggttcaaagagttggtagctcagagaaccttcgaaaaaccgccctgcaaggcggttttttcgttttcagagcaagagattacgcgcagaccaaaacgatctcaagaagatcatcttattaagtctgacgctctattcaacaaagccgccgtccatgggtagggggcttcaaatcgtcctcgtgataccaattcggagcctgcttttttgtacaaacttgttgataatggcaattcaaggatcttcacctagatccttttaaattaaaaatgaagttttaaatcaatctaaagtatatatgagtaaacttggtctgacagttaccaatgcttaatcagtgaggcacctatctcagcgatctgtctatttcgttcatccatagttgcctgactccccgtcgtgtagataactacgatacgggagggcttaccatctggccccagtgctgcaatgataccgcgagagccacgctcaccggctccagatttatcagcaataaaccagccagccggaagggccgagcgcagaagtggtcctgcaactttatccgcctccatccagtctattaattgttgccgggaagctagagtaagtagttcgccagttaatagtttgcgcaacgttgttgccattgctacaggcatcgtggtgtcacgctcgtcgtttggtatggcttcattcagctccggttcccaacgatcaaggcgagttacatgatcccccatgttgtgcaaaaaagcggttagctccttcggtcctccgatcgttgtcagaagtaagttggccgcagtgttatcactcatggttatggcagcactgcataattctcttactgtcatgccatccgtaagatgcttttctgtgactggtgagtactcaaccaagtcattctgagaatagtgtatgcggcgaccgagttgctcttgcccggcgtcaatacgggataataccgcgccacatagcagaactttaaaagtgctcatcattggaaaacgttcttcggggcgaaaactctcaaggatcttaccgctgttgagatccagttcgatgtaacccactcgtgcacccaactgatcttcagcatcttttactttcaccagcgtttctgggtgagcaaaaacaggaaggcaaaatgccgcaaaaaagggaataagggcgacacggaaatgttgaatactcatactcttcctttttcaatattattgaagcatttatcagggttattgtctcatgagcggatacatatttgaatgtatttagaaaaataaacaaataggggttccgcgcacatttccccgaaaagtgccagatacctgaaacaaaacccatcgtacggccaaggaagtctccaataactgtgatccaccacaagcgccagggttttcccagtcacgacgttgtaaaacgacggccagtcatgcataatccgcacgcatctggaataaggaagtgccattccgcctgacctttgcctatgaggaccaaaacgaaaaaacaccctttcgggtgtcttttctggaatttggtaccgagaggctccatgattcagtatgacttgcctttggtcgaaaaaaaaagcccgcactgtcaggtgcgggcttttttctgtgtttccttattaggacccactttcacatttaagttgtttttctaatccgcatatgatcaattcaaggccgaataagaaggctggctctgcaccttggtgatcaaataattcgatagcttgtcgtaataatggcggcatactatcagtagtaggtgtttccctttcttctttagcgacttgatgctcttgatcttccaatacgcaacctaaagtaaaatgccccacagcgctgagtgcatataatgcattctctagtgaaaaaccttgttggcataaaaaggctaattgattttcgagagtttcatactgtttttctgtaggccgtgtacctaaatgtacttttgctccatcgcgatgacttagtaaagcacatctaaaacttttagcgttattacgtaaaaaatcttgccagctttccccttctaaagggcaaaagtgagtatggtgcctatctaacatctcaatggctaaggcgtcgagcaaagcccgcttattttttacatgccaatacaatgtaggctgctctacacctagcttctgggcgagtttacgggttgttaaaccttcgattccgacctcattaagcagctctaatgcgctgttaatcactttacttttatctaatctggacatattcaccaccctgaattgactctcttccgggcgctatcatgccataccgcgaaaggttttgcgccattcgatggcgcgccgccattgcttgtgcaatgtacatcagagattttgagacacaaccaattattgaaggcctccctaacggggggcctttttttgtttctggtcccccgcttaacgatcgttggctgttttcagcaggacgcactgacctccctatcagtgatagagattgacatccctatcagtgatagagatactgagcacagctgtcaccggatgtgctttccggtctgatgagtccgtgaggacgaaacagcctctacaaataattttgtttaaatcacacgggtaaggaggtatttaaatgaaaacactgtcccaagcacagtcgaagacgagtagccagcagttttctttcaccggtaattctagcgctaacgtgattatcggcaaccagaaactaactatcaacgacgtcgcccgcgttgctcggaacgggaccttagtaagcctgactaacaacactgatatacttcaaggcattcaggcgtcctgtgattatatcaataacgcagttgagtctggtgaaccaatttacggtgtgacctcaggcttcggcggtatggcgaacgttgctatcagccgtgaacaggcctccgaactgcaacataatttggtatggtatcacaaaactggtgctgggaacaaactccctttggcggacgtacgtgcagcaatgctgctgcgcgccaactcgcatatgcgtggcgcgtccggtatccgtctggagctgatcaaacgtatggaaatcttcttgaacgctggtgttactccgtacgtttatgaatttggatctatcggcgcttctggagatctggtcccgctgagctacattacgggttccctgattggccttgacccgagcttcaaggtggatttcaacggcaaagaaatggacgccccgaccgcgttacgccagttaaatctgtctcccctgacacttctgcctaaagaaagtctagctatgctcaatgggacctcagtcatgactggcatcgcagctaactgcgtatacgacacccagatcctgactgcgattgcaatgggtgttcacgctctggatatccaggccctgaacggcaccaaccagtctttccacccgtttatccataactctaagccgcacccaggtcagctgtgggcggctgatcagatgatatcattgctggctaactcgcaactggtacgggacgagctggacggcaaacatgattaccgcgaccacgagctgatccaggatcgttatagcctgcgttgccttccgcagtacctgggtccgattgtggacggtatctcacagatagcaaaacaaatcgaaattgaaattaactccgttactgataaccctctgattgacgtcgataaccaggcgtcgtaccacggcggaaatttcctgggtcagtatgttggcatgggtatggaccaccttcgctactatatcggcctgctggcgaaacacctggatgtgcagattgcgctgctagctagtcccgaatttagcaacggactgccgccatctttattgggcaaccgtgaacgtaaggttaacatgggtctgaaaggtttacaaatctgtggcaattccatcatgccgctgctgacgttctacggcaatagcatcgccgaccgctttccgacccatgcagagcaattcaaccagaatatcaactctcagggctacacctccgcaacgctggcgcgacgtagtgttgatatcttccaaaactacgttgcgattgccctgatgtttggcgtccaggctgtagacctgaggacttataaaaagactggccattacgatgcgcgtgcttgcctctctccggctaccgaacgcctgtattccgccgtgcgtcacgtagttggtcagaaacctacttcagatcgcccatacatctggaacgataacgagcagggtctggatgaacacatcgctcgcatctccgctgacattgccgctggcggagtaattgttcaagctgtacaggatatcctgccgtgcctgcactaaccggcttatcggtcagtttcacctgatttacgtaaaaacccgcttcggcgggtttttgcttttggaggggcagaaagatgaatgactgtccacgacgctatacccaaaagaaa

SEQ ID NO: 323 - DNA, 5122 bp, synthetic construct
  source 1..5122: mol_type = other DNA
aggctaggtggaggctcagtgatgataagtctgcgatggtggatgcatgtgtcatggtcatagctgtttcctgtgtgaaattgttatccgctcagagggcacaatcctattccgcgctatccgacaatctccaagacattaggtggagttcagttcggcgagcggaaatggcttacgaacggggcggagatttcctggaagatgccaggaagatacttaacagggaagtgagagggccgcggcaaagccgtttttccataggctccgcccccctgacaagcatcacgaaatctgacgctcaaatcagtggtggcgaaacccgacaggactataaagataccaggcgtttccccctggcggctccctcgtgcgctctcctgttcctgcctttcggtttaccggtgtcattccgctgttatggccgcgtttgtctcattccacgcctgacactcagttccgggtaggcagttcgctccaagctggactgtatgcacgaaccccccgttcagtccgaccgctgcgccttatccggtaactatcgtcttgagtccaacccggaaagacatgcaaaagcaccactggcagcagccactggtaattgatttagaggagttagtcttgaagtcatgcgccggttaaggctaaactgaaaggacaagttttggtgactgcgctcctccaagccagttacctcggttcaaagagttggtagctcagagaaccttcgaaaaaccgccctgcaaggcggttttttcgttttcagagcaagagattacgcgcagaccaaaacgatctcaagaagatcatcttattaagtctgacgctctattcaacaaagccgccgtccatgggtagggggcttcaaatcgtcctcgtgataccaattcggagcctgcttttttgtacaaacttgttgataatggcaattcaaggatcttcacctagatccttttaaattaaaaatgaagttttaaatcaatctaaagtatatatgagtaaacttggtctgacagttaccaatgcttaatcagtgaggcacctatctcagcgatctgtctatttcgttcatccatagttgcctgactccccgtcgtgtagataactacgatacgggagggcttaccatctggccccagtgctgcaatgataccgcgagagccacgctcaccggctccagatttatcagcaataaaccagccagccggaagggccgagcgcagaagtggtcctgcaactttatccgcctccatccagtctattaattgttgccgggaagctagagtaagtagttcgccagttaatagtttgcgcaacgttgttgccattgctacaggcatcgtggtgtcacgctcgtcgtttggtatggcttcattcagctccggttcccaacgatcaaggcgagttacatgatcccccatgttgtgcaaaaaagcggttagctccttcggtcctccgatcgttgtcagaagtaagttggccgcagtgttatcactcatggttatggcagcactgcataattctcttactgtcatgccatccgtaagatgcttttctgtgactggtgagtactcaaccaagtcattctgagaatagtgtatgcggcgaccgagttgctcttgcccggcgtcaatacgggataataccgcgccacatagcagaactttaaaagtgctcatcattggaaaacgttcttcggggcgaaaactctcaaggatcttaccgctgttgagatccagttcgatgtaacccactcgtgcacccaactgatcttcagcatcttttactttcaccagcgtttctgggtgagcaaaaacaggaaggcaaaatgccgcaaaaaagggaataagggcgacacggaaatgttgaatactcatactcttcctttttcaatattattgaagcatttatcagggttattgtctcatgagcggatacatatttgaatgtatttagaaaaataaacaaataggggttccgcgcacatttccccgaaaagtgccagatacctgaaacaaaacccatcgtacggccaaggaagtctccaataactgtgatccaccacaagcgccagggttttcccagtcacgacgttgtaaaacgacggccagtcatgcataatccgcacgcatctggaataaggaagtgccattccgcctgacctttgcctatgaggaccaaaacgaaaaaacaccctttcgggtgtcttttctggaatttggtaccgagaggctccatgattcagtatgacttgcctttggtcgaaaaaaaaagcccgcactgtcaggtgcgggcttttttctgtgtttccttattaggacccactttcacatttaagttgtttttctaatccgcatatgatcaattcaaggccgaataagaaggctggctctgcaccttggtgatcaaataattcgatagcttgtcgtaataatggcggcatactatcagtagtaggtgtttccctttcttctttagcgacttgatgctcttgatcttccaatacgcaacctaaagtaaaatgccccacagcgctgagtgcatataatgcattctctagtgaaaaaccttgttggcataaaaaggctaattgattttcgagagtttcatactgtttttctgtaggccgtgtacctaaatgtacttttgctccatcgcgatgacttagtaaagcacatctaaaacttttagcgttattacgtaaaaaatcttgccagctttccccttctaaagggcaaaagtgagtatggtgcctatctaacatctcaatggctaaggcgtcgagcaaagcccgcttattttttacatgccaatacaatgtaggctgctctacacctagcttctgggcgagtttacgggttgttaaaccttcgattccgacctcattaagcagctctaatgcgctgttaatcactttacttttatctaatctggacatattcaccaccctgaattgactctcttccgggcgctatcatgccataccgcgaaaggttttgcgccattcgatggcgcgccgccattgcttgtgcaatgtacatcagagattttgagacacaaccaattattgaaggcctccctaacggggggcctttttttgtttctggtcccccgcttaacgatcgttggctgttttcagcaggacgcactgacctccctatcagtgatagagattgacatccctatcagtgatagagatactgagcacagctgtcaccggatgtgctttccggtctgatgagtccgtgaggacgaaacagcctctacaaataattttgtttaaatcacacgggtaaggaggtatttaaatgaaaacactgtcccaagcacagtcgaagacgagtagccagcagttttctttcaccggtaattctagcgctaacgtgattatcggcaaccagaaactaactatcaacgacgtcgcccgcgttgctcggaacgggaccttagtaagcctgactaacaacactgatatacttcaaggcattcaggcgtcctgtgattatatcaataacgcagttgagtctggtgaaccaatttacggtgtgacctcaggcttcggcggtatggcgaacgttgctatcagccgtgaacaggcctccgaactgcaaaccaatatggtatggtttatgaaaactggtgctgggaacaaactccctttggcggacgtacgtgcagcaatgctgctgcgcgccaactcgcatatgcgtggcgcgtccggtatccgtctggagctgatcaaacgtatggaaatcttcttgaacgctggtgttactccgtacgtttatgaatttggatctatcggcgcttctggagatctggtcccgctgagctacattacgggttccctgattggccttgacccgagcttcaaggtggatttcaacggcaaagaaatggacgccccgaccgcgttacgccagttaaatctgtctcccctgacacttctgcctaaagaaggtattgctatgctcaatgggacctcagtcatgactggcatcgcagctaactgcgtatacgacacccagatcctgactgcgattgcaatgggtgttcacgctctggatatccaggccctgaacggcaccaaccagtctttccacccgtttatccataactctaagccgcacccaggtcagctgtgggcggctgatcagatgatatcattgctggctaactcgcaactggtacgggacgagctggacggcaaacatgattaccgcgaccacgagctgatccaggatcgttatagcctgcgttgccttccgcagtacctgggtccgattgtggacggtatctcacagatagcaaaacaaatcgaaattgaaattaactccgttactgataaccctctgattgacgtcgataaccaggcgtcgtaccacggcggaaatttcctgggtcagtatgttggcatgggtatggaccaccttcgctactatatcggcctgctggcgaaacacctggatgtgcagattgcgctgctagctagtcccgaatttagcaacggactgccgccatctttattgggcaaccgtgaacgtaaggttaacatgggtctgaaaggtttacaaatctgtggcaattccatcatgccgctgctgacgttctacggcaatagcatcgccgaccgctttccgacccatgcagagcaattcaaccagaatatcaactctcagggctacacctccgcaacgctggcgcgacgtagtgttgatatcttccaaaactacgttgcgattgccctgatgtttggcgtccaggctgtagacctgaggacttataaaaagactggccattacgatgcgcgtgcttgcctctctccggctaccgaacgcctgtattccgccgtgcgtcacgtagttggtcagaaacctacttcagatcgcccatacatctggaacgataacgagcagggtctggatgaacacatcgctcgcatctccgctgacattgccgctggcggagtaattgttcaagctgtacaggatatcctgccgtgcctgcactaaccggcttatcggtcagtttcacctgatttacgtaaaaacccgcttcggcgggtttttgcttttggaggggcagaaagatgaatgactgtccacgacgctatacccaaaagaaa

SEQ ID NO: 324 - DNA, 5122 bp, synthetic construct
  source 1..5122: mol_type = other DNA
aggctaggtggaggctcagtgatgataagtctgcgatggtggatgcatgtgtcatggtcatagctgtttcctgtgtgaaattgttatccgctcagagggcacaatcctattccgcgctatccgacaatctccaagacattaggtggagttcagttcggcgagcggaaatggcttacgaacggggcggagatttcctggaagatgccaggaagatacttaacagggaagtgagagggccgcggcaaagccgtttttccataggctccgcccccctgacaagcatcacgaaatctgacgctcaaatcagtggtggcgaaacccgacaggactataaagataccaggcgtttccccctggcggctccctcgtgcgctctcctgttcctgcctttcggtttaccggtgtcattccgctgttatggccgcgtttgtctcattccacgcctgacactcagttccgggtaggcagttcgctccaagctggactgtatgcacgaaccccccgttcagtccgaccgctgcgccttatccggtaactatcgtcttgagtccaacccggaaagacatgcaaaagcaccactggcagcagccactggtaattgatttagaggagttagtcttgaagtcatgcgccggttaaggctaaactgaaaggacaagttttggtgactgcgctcctccaagccagttacctcggttcaaagagttggtagctcagagaaccttcgaaaaaccgccctgcaaggcggttttttcgttttcagagcaagagattacgcgcagaccaaaacgatctcaagaagatcatcttattaagtctgacgctctattcaacaaagccgccgtccatgggtagggggcttcaaatcgtcctcgtgataccaattcggagcctgcttttttgtacaaacttgttgataatggcaattcaaggatcttcacctagatccttttaaattaaaaatgaagttttaaatcaatctaaagtatatatgagtaaacttggtctgacagttaccaatgcttaatcagtgaggcacctatctcagcgatctgtctatttcgttcatccatagttgcctgactccccgtcgtgtagataactacgatacgggagggcttaccatctggccccagtgctgcaatgataccgcgagagccacgctcaccggctccagatttatcagcaataaaccagccagccggaagggccgagcgcagaagtggtcctgcaactttatccgcctccatccagtctattaattgttgccgggaagctagagtaagtagttcgccagttaatagtttgcgcaacgttgttgccattgctacaggcatcgtggtgtcacgctcgtcgtttggtatggcttcattcagctccggttcccaacgatcaaggcgagttacatgatcccccatgttgtgcaaaaaagcggttagctccttcggtcctccgatcgttgtcagaagtaagttggccgcagtgttatcactcatggttatggcagcactgcataattctcttactgtcatgccatccgtaagatgcttttctgtgactggtgagtactcaaccaagtcattctgagaatagtgtatgcggcgaccgagttgctcttgcccggcgtcaatacgggataataccgcgccacatagcagaactttaaaagtgctcatcattggaaaacgttcttcggggcgaaaactctcaaggatcttaccgctgttgagatccagttcgatgtaacccactcgtgcacccaactgatcttcagcatcttttactttcaccagcgtttctgggtgagcaaaaacaggaaggcaaaatgccgcaaaaaagggaataagggcgacacggaaatgttgaatactcatactcttcctttttcaatattattgaagcatttatcagggttattgtctcatgagcggatacatatttgaatgtatttagaaaaataaacaaataggggttccgcgcacatttccccgaaaagtgccagatacctgaaacaaaacccatcgtacggccaaggaagtctccaataactgtgatccaccacaagcgccagggttttcccagtcacgacgttgtaaaacgacggccagtcatgcataatccgcacgcatctggaataaggaagtgccattccgcctgacctttgcctatgaggaccaaaacgaaaaaacaccctttcgggtgtcttttctggaatttggtaccgagaggctccatgattcagtatgacttgcctttggtcgaaaaaaaaagcccgcactgtcaggtgcgggcttttttctgtgtttccttattaggacccactttcacatttaagttgtttttctaatccgcatatgatcaattcaaggccgaataagaaggctggctctgcaccttggtgatcaaataattcgatagcttgtcgtaataatggcggcatactatcagtagtaggtgtttccctttcttctttagcgacttgatgctcttgatcttccaatacgcaacctaaagtaaaatgccccacagcgctgagtgcatataatgcattctctagtgaaaaaccttgttggcataaaaaggctaattgattttcgagagtttcatactgtttttctgtaggccgtgtacctaaatgtacttttgctccatcgcgatgacttagtaaagcacatctaaaacttttagcgttattacgtaaaaaatcttgccagctttccccttctaaagggcaaaagtgagtatggtgcctatctaacatctcaatggctaaggcgtcgagcaaagcccgcttattttttacatgccaatacaatgtaggctgctctacacctagcttctgggcgagtttacgggttgttaaaccttcgattccgacctcattaagcagctctaatgcgctgttaatcactttacttttatctaatctggacatattcaccaccctgaattgactctcttccgggcgctatcatgccataccgcgaaaggttttgcgccattcgatggcgcgccgccattgcttgtgcaatgtacatcagagattttgagacacaaccaattattgaaggcctccctaacggggggcctttttttgtttctggtcccccgcttaacgatcgttggctgttttcagcaggacgcactgacctccctatcagtgatagagattgacatccctatcagtgatagagatactgagcacagctgtcaccggatgtgctttccggtctgatgagtccgtgaggacgaaacagcctctacaaataattttgtttaaatcacacgggtaaggaggtatttaaatgaaaacactgtcccaagcacagtcgaagacgagtagccagcagttttctttcaccggtaattctagcgctaacgtgattatcggcaaccagaaactaactatcaacgacgtcgcccgcgttgctcggaacgggaccttagtaagcctgactaacaacactgatatacttcaaggcattcaggcgtcctgtgattatatcaataacgcagttgagtctggtgaaccaatttacggtgtgacctcaggcttcggcggtatggcgaacgttgctatcagccgtgaacaggcctccgaactgcaaaccaatattgtatggtatcacaaaactggtgctgggaacaaactccctttggcggacgtacgtgcagcaatgctgctgcgcgccaactcgcatatgcgtggcgcgtccggtatccgtctggagctgatcaaacgtatggaaatcttcttgaacgctggtgttactccgtacgtttatgaatttggatctatcggcgcttctggagatctggtcccgctgagctacattacgggttccctgattggccttgacccgagcttcaaggtggatttcaacggcaaagaaatggacgccccgaccgcgttacgccagttaaatctgtctcccctgacacttctgcctaaagaagccctagctatggtcaatgggacctcagtcatgactggcatcgcagctaactgcgtatacgacacccagatcctgactgcgattgcaatgggtgttcacgctctggatatccaggccctgaacggcaccaaccagtctttccacccgtttatccataactctaagccgcacccaggtcagctgtgggcggctgatcagatgatatcattgctggctaactcgcaactggtacgggacgagctggacggcaaacatgattaccgcgaccacgagctgatccaggatcgttatagcctgcgttgccttccgcagtacctgggtccgattgtggacggtatctcacagatagcaaaacaaatcgaaattgaaattaactccgttactgataaccctctgattgacgtcgataaccaggcgtcgtaccacggcggaaatttcctgggtcagtatgttggcatgggtatggaccaccttcgctactatatcggcctgctggcgaaacacctggatgtgcagattgcgctgctagctagtcccgaatttagcaacggactgccgccatctttattgggcaaccgtgaacgtaaggttaacatgggtctgaaaggtttacaaatctgtggcaattccatcatgccgctgctgacgttctacggcaatagcatcgccgaccgctttccgacccatgcagagcaattcaaccagaatatcaactctcagggctacacctccgcaacgctggcgcgacgtagtgttgatatcttccaaaactacgttgcgattgccctgatgtttggcgtccaggctgtagacctgaggacttataaaaagactggccattacgatgcgcgtgcttgcctctctccggctaccgaacgcctgtattccgccgtgcgtcacgtagttggtcagaaacctacttcagatcgcccatacatctggaacgataacgagcagggtctggatgaacacatcgctcgcatctccgctgacattgccgctggcggagtaattgttcaagctgtacaggatatcctgccgtgcctgcactaaccggcttatcggtcagtttcacctgatttacgtaaaaacccgcttcggcgggtttttgcttttggaggggcagaaagatgaatgactgtccacgacgctatacccaaaagaaa

SEQ ID NO: 325 - DNA, 5122 bp, synthetic construct
  source 1..5122: mol_type = other DNA
aggctaggtggaggctcagtgatgataagtctgcgatggtggatgcatgtgtcatggtcatagctgtttcctgtgtgaaattgttatccgctcagagggcacaatcctattccgcgctatccgacaatctccaagacattaggtggagttcagttcggcgagcggaaatggcttacgaacggggcggagatttcctggaagatgccaggaagatacttaacagggaagtgagagggccgcggcaaagccgtttttccataggctccgcccccctgacaagcatcacgaaatctgacgctcaaatcagtggtggcgaaacccgacaggactataaagataccaggcgtttccccctggcggctccctcgtgcgctctcctgttcctgcctttcggtttaccggtgtcattccgctgttatggccgcgtttgtctcattccacgcctgacactcagttccgggtaggcagttcgctccaagctggactgtatgcacgaaccccccgttcagtccgaccgctgcgccttatccggtaactatcgtcttgagtccaacccggaaagacatgcaaaagcaccactggcagcagccactggtaattgatttagaggagttagtcttgaagtcatgcgccggttaaggctaaactgaaaggacaagttttggtgactgcgctcctccaagccagttacctcggttcaaagagttggtagctcagagaaccttcgaaaaaccgccctgcaaggcggttttttcgttttcagagcaagagattacgcgcagaccaaaacgatctcaagaagatcatcttattaagtctgacgctctattcaacaaagccgccgtccatgggtagggggcttcaaatcgtcctcgtgataccaattcggagcctgcttttttgtacaaacttgttgataatggcaattcaaggatcttcacctagatccttttaaattaaaaatgaagttttaaatcaatctaaagtatatatgagtaaacttggtctgacagttaccaatgcttaatcagtgaggcacctatctcagcgatctgtctatttcgttcatccatagttgcctgactccccgtcgtgtagataactacgatacgggagggcttaccatctggccccagtgctgcaatgataccgcgagagccacgctcaccggctccagatttatcagcaataaaccagccagccggaagggccgagcgcagaagtggtcctgcaactttatccgcctccatccagtctattaattgttgccgggaagctagagtaagtagttcgccagttaatagtttgcgcaacgttgttgccattgctacaggcatcgtggtgtcacgctcgtcgtttggtatggcttcattcagctccggttcccaacgatcaaggcgagttacatgatcccccatgttgtgcaaaaaagcggttagctccttcggtcctccgatcgttgtcagaagtaagttggccgcagtgttatcactcatggttatggcagcactgcataattctcttactgtcatgccatccgtaagatgcttttctgtgactggtgagtactcaaccaagtcattctgagaatagtgtatgcggcgaccgagttgctcttgcccggcgtcaatacgggataataccgcgccacatagcagaactttaaaagtgctcatcattggaaaacgttcttcggggcgaaaactctcaaggatcttaccgctgttgagatccagttcgatgtaacccactcgtgcacccaactgatcttcagcatcttttactttcaccagcgtttctgggtgagcaaaaacaggaaggcaaaatgccgcaaaaaagggaataagggcgacacggaaatgttgaatactcatactcttcctttttcaatattattgaagcatttatcagggttattgtctcatgagcggatacatatttgaatgtatttagaaaaataaacaaataggggttccgcgcacatttccccgaaaagtgccagatacctgaaacaaaacccatcgtacggccaaggaagtctccaataactgtgatccaccacaagcgccagggttttcccagtcacgacgttgtaaaacgacggccagtcatgcataatccgcacgcatctggaataaggaagtgccattccgcctgacctttgcctatgaggaccaaaacgaaaaaacaccctttcgggtgtcttttctggaatttggtaccgagaggctccatgattcagtatgacttgcctttggtcgaaaaaaaaagcccgcactgtcaggtgcgggcttttttctgtgtttccttattaggacccactttcacatttaagttgtttttctaatccgcatatgatcaattcaaggccgaataagaaggctggctctgcaccttggtgatcaaataattcgatagcttgtcgtaataatggcggcatactatcagtagtaggtgtttccctttcttctttagcgacttgatgctcttgatcttccaatacgcaacctaaagtaaaatgccccacagcgctgagtgcatataatgcattctctagtgaaaaaccttgttggcataaaaaggctaattgattttcgagagtttcatactgtttttctgtaggccgtgtacctaaatgtacttttgctccatcgcgatgacttagtaaagcacatctaaaacttttagcgttattacgtaaaaaatcttgccagctttccccttctaaagggcaaaagtgagtatggtgcctatctaacatctcaatggctaaggcgtcgagcaaagcccgcttattttttacatgccaatacaatgtaggctgctctacacctagcttctgggcgagtttacgggttgttaaaccttcgattccgacctcattaagcagctctaatgcgctgttaatcactttacttttatctaatctggacatattcaccaccctgaattgactctcttccgggcgctatcatgccataccgcgaaaggttttgcgccattcgatggcgcgccgccattgcttgtgcaatgtacatcagagattttgagacacaaccaattattgaaggcctccctaacggggggcctttttttgtttctggtcccccgcttaacgatcgttggctgttttcagcaggacgcactgacctccctatcagtgatagagattgacatccctatcagtgatagagatactgagcacagctgtcaccggatgtgctttccggtctgatgagtccgtgaggacgaaacagcctctacaaataattttgtttaaatcacacgggtaaggaggtatttaaatgaaaacactgtcccaagcacagtcgaagacgagtagccagcagttttctttcaccggtaattctagcgctaacgtgattatcggcaaccagaaactaactatcaacgacgtcgcccgcgttgctcggaacgggaccttagtaagcctgactaacaacactgatatacttcaaggcattcaggcgtcctgtgattatatcaataacgcagttgagtctggtgaaccaatttacggtgtgacctcaggcttcggcggtatggcgaacgttgctatcagccgtgaacaggcctccgaactgcaagagaatatggtatggagtctgaaaactggtgctgggaacaaactccctttggcggacgtacgtgcagcaatgctgctgcgcgccaactcgcatatgcgtggcgcgtccggtatccgtctggagctgatcaaacgtatggaaatcttcttgaacgctggtgttactccgtacgtttatgaatttggatctatcggcgcttctggagatctggtcccgctgagctacattacgggttccctgattggccttgacccgagcttcaaggtggatttcaacggcaaagaaatggacgccccgaccgcgttacgccagttaaatctgtctcccctgacacttctgcctaaagaagcgattgctatgaataatgggacctcagtcatgactggcatcgcagctaactgcgtatacgacacccagatcctgactgcgattgcaatgggtgttcacgctctggatatccaggccctgaacggcaccaaccagtctttccacccgtttatccataactctaagccgcacccaggtcagctgtgggcggctgatcagatgatatcattgctggctaactcgcaactggtacgggacgagctggacggcaaacatgattaccgcgaccacgagctgatccaggatcgttatagcctgcgttgccttccgcagtacctgggtccgattgtggacggtatctcacagatagcaaaacaaatcgaaattgaaattaactccgttactgataaccctctgattgacgtcgataaccaggcgtcgtaccacggcggaaatttcctgggtcagtatgttggcatgggtatggaccaccttcgctactatatcggcctgctggcgaaacacctggatgtgcagattgcgctgctagctagtcccgaatttagcaacggactgccgccatctttattgggcaaccgtgaacgtaaggttaacatgggtctgaaaggtttacaaatctgtggcaattccatcatgccgctgctgacgttctacggcaatagcatcgccgaccgctttccgacccatgcagagcaattcaaccagaatatcaactctcagggctacacctccgcaacgctggcgcgacgtagtgttgatatcttccaaaactacgttgcgattgccctgatgtttggcgtccaggctgtagacctgaggacttataaaaagactggccattacgatgcgcgtgcttgcctctctccggctaccgaacgcctgtattccgccgtgcgtcacgtagttggtcagaaacctacttcagatcgcccatacatctggaacgataacgagcagggtctggatgaacacatcgctcgcatctccgctgacattgccgctggcggagtaattgttcaagctgtacaggatatcctgccgtgcctgcactaaccggcttatcggtcagtttcacctgatttacgtaaaaacccgcttcggcgggtttttgcttttggaggggcagaaagatgaatgactgtccacgacgctatacccaaaagaaa

SEQ ID NO: 326 - DNA, 5122 bp, synthetic construct
  source 1..5122: mol_type = other DNA
aggctaggtggaggctcagtgatgataagtctgcgatggtggatgcatgtgtcatggtcatagctgtttcctgtgtgaaattgttatccgctcagagggcacaatcctattccgcgctatccgacaatctccaagacattaggtggagttcagttcggcgagcggaaatggcttacgaacggggcggagatttcctggaagatgccaggaagatacttaacagggaagtgagagggccgcggcaaagccgtttttccataggctccgcccccctgacaagcatcacgaaatctgacgctcaaatcagtggtggcgaaacccgacaggactataaagataccaggcgtttccccctggcggctccctcgtgcgctctcctgttcctgcctttcggtttaccggtgtcattccgctgttatggccgcgtttgtctcattccacgcctgacactcagttccgggtaggcagttcgctccaagctggactgtatgcacgaaccccccgttcagtccgaccgctgcgccttatccggtaactatcgtcttgagtccaacccggaaagacatgcaaaagcaccactggcagcagccactggtaattgatttagaggagttagtcttgaagtcatgcgccggttaaggctaaactgaaaggacaagttttggtgactgcgctcctccaagccagttacctcggttcaaagagttggtagctcagagaaccttcgaaaaaccgccctgcaaggcggttttttcgttttcagagcaagagattacgcgcagaccaaaacgatctcaagaagatcatcttattaagtctgacgctctattcaacaaagccgccgtccatgggtagggggcttcaaatcgtcctcgtgataccaattcggagcctgcttttttgtacaaacttgttgataatggcaattcaaggatcttcacctagatccttttaaattaaaaatgaagttttaaatcaatctaaagtatatatgagtaaacttggtctgacagttaccaatgcttaatcagtgaggcacctatctcagcgatctgtctatttcgttcatccatagttgcctgactccccgtcgtgtagataactacgatacgggagggcttaccatctggccccagtgctgcaatgataccgcgagagccacgctcaccggctccagatttatcagcaataaaccagccagccggaagggccgagcgcagaagtggtcctgcaactttatccgcctccatccagtctattaattgttgccgggaagctagagtaagtagttcgccagttaatagtttgcgcaacgttgttgccattgctacaggcatcgtggtgtcacgctcgtcgtttggtatggcttcattcagctccggttcccaacgatcaaggcgagttacatgatcccccatgttgtgcaaaaaagcggttagctccttcggtcctccgatcgttgtcagaagtaagttggccgcagtgttatcactcatggttatggcagcactgcataattctcttactgtcatgccatccgtaagatgcttttctgtgactggtgagtactcaaccaagtcattctgagaatagtgtatgcggcgaccgagttgctcttgcccggcgtcaatacgggataataccgcgccacatagcagaactttaaaagtgctcatcattggaaaacgttcttcggggcgaaaactctcaaggatcttaccgctgttgagatccagttcgatgtaacccactcgtgcacccaactgatcttcagcatcttttactttcaccagcgtttctgggtgagcaaaaacaggaaggcaaaatgccgcaaaaaagggaataagggcgacacggaaatgttgaatactcatactcttcctttttcaatattattgaagcatttatcagggttattgtctcatgagcggatacatatttgaatgtatttagaaaaataaacaaataggggttccgcgcacatttccccgaaaagtgccagatacctgaaacaaaacccatcgtacggccaaggaagtctccaataactgtgatccaccacaagcgccagggttttcccagtcacgacgttgtaaaacgacggccagtcatgcataatccgcacgcatctggaataaggaagtgccattccgcctgacctttgcctatgaggaccaaaacgaaaaaacaccctttcgggtgtcttttctggaatttggtaccgagaggctccatgattcagtatgacttgcctttggtcgaaaaaaaaagcccgcactgtcaggtgcgggcttttttctgtgtttccttattaggacccactttcacatttaagttgtttttctaatccgcatatgatcaattcaaggccgaataagaaggctggctctgcaccttggtgatcaaataattcgatagcttgtcgtaataatggcggcatactatcagtagtaggtgtttccctttcttctttagcgacttgatgctcttgatcttccaatacgcaacctaaagtaaaatgccccacagcgctgagtgcatataatgcattctctagtgaaaaaccttgttggcataaaaaggctaattgattttcgagagtttcatactgtttttctgtaggccgtgtacctaaatgtacttttgctccatcgcgatgacttagtaaagcacatctaaaacttttagcgttattacgtaaaaaatcttgccagctttccccttctaaagggcaaaagtgagtatggtgcctatctaacatctcaatggctaaggcgtcgagcaaagcccgcttattttttacatgccaatacaatgtaggctgctctacacctagcttctgggcgagtttacgggttgttaaaccttcgattccgacctcattaagcagctctaatgcgctgttaatcactttacttttatctaatctggacatattcaccaccctgaattgactctcttccgggcgctatcatgccataccgcgaaaggttttgcgccattcgatggcgcgccgccattgcttgtgcaatgtacatcagagattttgagacacaaccaattattgaaggcctccctaacggggggcctttttttgtttctggtcccccgcttaacgatcgttggctgttttcagcaggacgcactgacctccctatcagtgatagagattgacatccctatcagtgatagagatactgagcacagctgtcaccggatgtgctttccggtctgatgagtccgtgaggacgaaacagcctctacaaataattttgtttaaatcacacgggtaaggaggtatttaaatgaaaacactgtcccaagcacagtcgaagacgagtagccagcagttttctttcaccggtaattctagcgctaacgtgattatcggcaaccagaaactaactatcaacgacgtcgcccgcgttgctcggaacgggaccttagtaagcctgactaacaacactgatatacttcaaggcattcaggcgtcctgtgattatatcaataacgcagttgagtctggtgaaccaatttacggtgtgacctcaggcttcggcggtatggcgaacgttgctatcagccgtgaacaggcctccgaactgcaagagaatgcggtatggcacctgaaaactggtgctgggaacaaactccctttggcggacgtacgtgcagcaatgctgctgcgcgccaactcgcatatgcgtggcgcgtccggtatccgtctggagctgatcaaacgtatggaaatcttcttgaacgctggtgttactccgtacgtttatgaatttggatctatcggcgcttctggagatctggtcccgctgagctacattacgggttccctgattggccttgacccgagcttcaaggtggatttcaacggcaaagaaatggacgccccgaccgcgttacgccagttaaatctgtctcccctgacacttctgcctaaagaaggtctagctatgattaatgggacctcagtcatgactggcatcgcagctaactgcgtatacgacacccagatcctgactgcgattgcaatgggtgttcacgctctggatatccaggccctgaacggcaccaaccagtctttccacccgtttatccataactctaagccgcacccaggtcagctgtgggcggctgatcagatgatatcattgctggctaactcgcaactggtacgggacgagctggacggcaaacatgattaccgcgaccacgagctgatccaggatcgttatagcctgcgttgccttccgcagtacctgggtccgattgtggacggtatctcacagatagcaaaacaaatcgaaattgaaattaactccgttactgataaccctctgattgacgtcgataaccaggcgtcgtaccacggcggaaatttcctgggtcagtatgttggcatgggtatggaccaccttcgctactatatcggcctgctggcgaaacacctggatgtgcagattgcgctgctagctagtcccgaatttagcaacggactgccgccatctttattgggcaaccgtgaacgtaaggttaacatgggtctgaaaggtttacaaatctgtggcaattccatcatgccgctgctgacgttctacggcaatagcatcgccgaccgctttccgacccatgcagagcaattcaaccagaatatcaactctcagggctacacctccgcaacgctggcgcgacgtagtgttgatatcttccaaaactacgttgcgattgccctgatgtttggcgtccaggctgtagacctgaggacttataaaaagactggccattacgatgcgcgtgcttgcctctctccggctaccgaacgcctgtattccgccgtgcgtcacgtagttggtcagaaacctacttcagatcgcccatacatctggaacgataacgagcagggtctggatgaacacatcgctcgcatctccgctgacattgccgctggcggagtaattgttcaagctgtacaggatatcctgccgtgcctgcactaaccggcttatcggtcagtttcacctgatttacgtaaaaacccgcttcggcgggtttttgcttttggaggggcagaaagatgaatgactgtccacgacgctatacccaaaagaaa

SEQ ID NO: 327 - DNA, 5122 bp, synthetic construct
  source 1..5122: mol_type = other DNA
aggctaggtggaggctcagtgatgataagtctgcgatggtggatgcatgtgtcatggtcatagctgtttcctgtgtgaaattgttatccgctcagagggcacaatcctattccgcgctatccgacaatctccaagacattaggtggagttcagttcggcgagcggaaatggcttacgaacggggcggagatttcctggaagatgccaggaagatacttaacagggaagtgagagggccgcggcaaagccgtttttccataggctccgcccccctgacaagcatcacgaaatctgacgctcaaatcagtggtggcgaaacccgacaggactataaagataccaggcgtttccccctggcggctccctcgtgcgctctcctgttcctgcctttcggtttaccggtgtcattccgctgttatggccgcgtttgtctcattccacgcctgacactcagttccgggtaggcagttcgctccaagctggactgtatgcacgaaccccccgttcagtccgaccgctgcgccttatccggtaactatcgtcttgagtccaacccggaaagacatgcaaaagcaccactggcagcagccactggtaattgatttagaggagttagtcttgaagtcatgcgccggttaaggctaaactgaaaggacaagttttggtgactgcgctcctccaagccagttacctcggttcaaagagttggtagctcagagaaccttcgaaaaaccgccctgcaaggcggttttttcgttttcagagcaagagattacgcgcagaccaaaacgatctcaagaagatcatcttattaagtctgacgctctattcaacaaagccgccgtccatgggtagggggcttcaaatcgtcctcgtgataccaattcggagcctgcttttttgtacaaacttgttgataatggcaattcaaggatcttcacctagatccttttaaattaaaaatgaagttttaaatcaatctaaagtatatatgagtaaacttggtctgacagttaccaatgcttaatcagtgaggcacctatctcagcgatctgtctatttcgttcatccatagttgcctgactccccgtcgtgtagataactacgatacgggagggcttaccatctggccccagtgctgcaatgataccgcgagagccacgctcaccggctccagatttatcagcaataaaccagccagccggaagggccgagcgcagaagtggtcctgcaactttatccgcctccatccagtctattaattgttgccgggaagctagagtaagtagttcgccagttaatagtttgcgcaacgttgttgccattgctacaggcatcgtggtgtcacgctcgtcgtttggtatggcttcattcagctccggttcccaacgatcaaggcgagttacatgatcccccatgttgtgcaaaaaagcggttagctccttcggtcctccgatcgttgtcagaagtaagttggccgcagtgttatcactcatggttatggcagcactgcataattctcttactgtcatgccatccgtaagatgcttttctgtgactggtgagtactcaaccaagtcattctgagaatagtgtatgcggcgaccgagttgctcttgcccggcgtcaatacgggataataccgcgccacatagcagaactttaaaagtgctcatcattggaaaacgttcttcggggcgaaaactctcaaggatcttaccgctgttgagatccagttcgatgtaacccactcgtgcacccaactgatcttcagcatcttttactttcaccagcgtttctgggtgagcaaaaacaggaaggcaaaatgccgcaaaaaagggaataagggcgacacggaaatgttgaatactcatactcttcctttttcaatattattgaagcatttatcagggttattgtctcatgagcggatacatatttgaatgtatttagaaaaataaacaaataggggttccgcgcacatttccccgaaaagtgccagatacctgaaacaaaacccatcgtacggccaaggaagtctccaataactgtgatccaccacaagcgccagggttttcccagtcacgacgttgtaaaacgacggccagtcatgcataatccgcacgcatctggaataaggaagtgccattccgcctgacctttgcctatgaggaccaaaacgaaaaaacaccctttcgggtgtcttttctggaatttggtaccgagaggctccatgattcagtatgacttgcctttggtcgaaaaaaaaagcccgcactgtcaggtgcgggcttttttctgtgtttccttattaggacccactttcacatttaagttgtttttctaatccgcatatgatcaattcaaggccgaataagaaggctggctctgcaccttggtgatcaaataattcgatagcttgtcgtaataatggcggcatactatcagtagtaggtgtttccctttcttctttagcgacttgatgctcttgatcttccaatacgcaacctaaagtaaaatgccccacagcgctgagtgcatataatgcattctctagtgaaaaaccttgttggcataaaaaggctaattgattttcgagagtttcatactgtttttctgtaggccgtgtacctaaatgtacttttgctccatcgcgatgacttagtaaagcacatctaaaacttttagcgttattacgtaaaaaatcttgccagctttccccttctaaagggcaaaagtgagtatggtgcctatctaacatctcaatggctaaggcgtcgagcaaagcccgcttattttttacatgccaatacaatgtaggctgctctacacctagcttctgggcgagtttacgggttgttaaaccttcgattccgacctcattaagcagctctaatgcgctgttaatcactttacttttatctaatctggacatattcaccaccctgaattgactctcttccgggcgctatcatgccataccgcgaaaggttttgcgccattcgatggcgcgccgccattgcttgtgcaatgtacatcagagattttgagacacaaccaattattgaaggcctccctaacggggggcctttttttgtttctggtcccccgcttaacgatcgttggctgttttcagcaggacgcactgacctccctatcagtgatagagattgacatccctatcagtgatagagatactgagcacagctgtcaccggatgtgctttccggtctgatgagtccgtgaggacgaaacagcctctacaaataattttgtttaaatcacacgggtaaggaggtatttaaatgaaaacactgtcccaagcacagtcgaagacgagtagccagcagttttctttcaccggtaattctagcgctaacgtgattatcggcaaccagaaactaactatcaacgacgtcgcccgcgttgctcggaacgggaccttagtaagcctgactaacaacactgatatacttcaaggcattcaggcgtcctgtgattatatcaataacgcagttgagtctggtgaaccaatttacggtgtgacctcaggcttcggcggtatggcgaacgttgctatcagccgtgaacaggcctccgaactgcaaaccaatgtggtatggtatcataaaactggtgctgggaacaaactccctttggcggacgtacgtgcagcaatgctgctgcgcgccaactcgcatatgcgtggcgcgtccggtatccgtctggagctgatcaaacgtatggaaatcttcttgaacgctggtgttactccgtacgtttatgaatttggatctatcggcgcttctggagatctggtcccgctgagctacattacgggttccctgattggccttgacccgagcttcaaggtggatttcaacggcaaagaaatggacgccccgaccgcgttacgccagttaaatctgtctcccctgacacttctgcctaaagaagcgctagctatgattaatgggacctcagtcatgactggcatcgcagctaactgcgtatacgacacccagatcctgactgcgattgcaatgggtgttcacgctctggatatccaggccctgaacggcaccaaccagtctttccacccgtttatccataactctaagccgcacccaggtcagctgtgggcggctgatcagatgatatcattgctggctaactcgcaactggtacgggacgagctggacggcaaacatgattaccgcgaccacgagctgatccaggatcgttatagcctgcgttgccttccgcagtacctgggtccgattgtggacggtatctcacagatagcaaaacaaatcgaaattgaaattaactccgttactgataaccctctgattgacgtcgataaccaggcgtcgtaccacggcggaaatttcctgggtcagtatgttggcatgggtatggaccaccttcgctactatatcggcctgctggcgaaacacctggatgtgcagattgcgctgctagctagtcccgaatttagcaacggactgccgccatctttattgggcaaccgtgaacgtaaggttaacatgggtctgaaaggtttacaaatctgtggcaattccatcatgccgctgctgacgttctacggcaatagcatcgccgaccgctttccgacccatgcagagcaattcaaccagaatatcaactctcagggctacacctccgcaacgctggcgcgacgtagtgttgatatcttccaaaactacgttgcgattgccctgatgtttggcgtccaggctgtagacctgaggacttataaaaagactggccattacgatgcgcgtgcttgcctctctccggctaccgaacgcctgtattccgccgtgcgtcacgtagttggtcagaaacctacttcagatcgcccatacatctggaacgataacgagcagggtctggatgaacacatcgctcgcatctccgctgacattgccgctggcggagtaattgttcaagctgtacaggatatcctgccgtgcctgcactaaccggcttatcggtcagtttcacctgatttacgtaaaaacccgcttcggcgggtttttgcttttggaggggcagaaagatgaatgactgtccacgacgctatacccaaaagaaa

SEQ ID NO: 328 - DNA, 5122 bp, synthetic construct
  source 1..5122: mol_type = other DNA
aggctaggtggaggctcagtgatgataagtctgcgatggtggatgcatgtgtcatggtcatagctgtttcctgtgtgaaattgttatccgctcagagggcacaatcctattccgcgctatccgacaatctccaagacattaggtggagttcagttcggcgagcggaaatggcttacgaacggggcggagatttcctggaagatgccaggaagatacttaacagggaagtgagagggccgcggcaaagccgtttttccataggctccgcccccctgacaagcatcacgaaatctgacgctcaaatcagtggtggcgaaacccgacaggactataaagataccaggcgtttccccctggcggctccctcgtgcgctctcctgttcctgcctttcggtttaccggtgtcattccgctgttatggccgcgtttgtctcattccacgcctgacactcagttccgggtaggcagttcgctccaagctggactgtatgcacgaaccccccgttcagtccgaccgctgcgccttatccggtaactatcgtcttgagtccaacccggaaagacatgcaaaagcaccactggcagcagccactggtaattgatttagaggagttagtcttgaagtcatgcgccggttaaggctaaactgaaaggacaagttttggtgactgcgctcctccaagccagttacctcggttcaaagagttggtagctcagagaaccttcgaaaaaccgccctgcaaggcggttttttcgttttcagagcaagagattacgcgcagaccaaaacgatctcaagaagatcatcttattaagtctgacgctctattcaacaaagccgccgtccatgggtagggggcttcaaatcgtcctcgtgataccaattcggagcctgcttttttgtacaaacttgttgataatggcaattcaaggatcttcacctagatccttttaaattaaaaatgaagttttaaatcaatctaaagtatatatgagtaaacttggtctgacagttaccaatgcttaatcagtgaggcacctatctcagcgatctgtctatttcgttcatccatagttgcctgactccccgtcgtgtagataactacgatacgggagggcttaccatctggccccagtgctgcaatgataccgcgagagccacgctcaccggctccagatttatcagcaataaaccagccagccggaagggccgagcgcagaagtggtcctgcaactttatccgcctccatccagtctattaattgttgccgggaagctagagtaagtagttcgccagttaatagtttgcgcaacgttgttgccattgctacaggcatcgtggtgtcacgctcgtcgtttggtatggcttcattcagctccggttcccaacgatcaaggcgagttacatgatcccccatgttgtgcaaaaaagcggttagctccttcggtcctccgatcgttgtcagaagtaagttggccgcagtgttatcactcatggttatggcagcactgcataattctcttactgtcatgccatccgtaagatgcttttctgtgactggtgagtactcaaccaagtcattctgagaatagtgtatgcggcgaccgagttgctcttgcccggcgtcaatacgggataataccgcgccacatagcagaactttaaaagtgctcatcattggaaaacgttcttcggggcgaaaactctcaaggatcttaccgctgttgagatccagttcgatgtaacccactcgtgcacccaactgatcttcagcatcttttactttcaccagcgtttctgggtgagcaaaaacaggaaggcaaaatgccgcaaaaaagggaataagggcgacacggaaatgttgaatactcatactcttcctttttcaatattattgaagcatttatcagggttattgtctcatgagcggatacatatttgaatgtatttagaaaaataaacaaataggggttccgcgcacatttccccgaaaagtgccagatacctgaaacaaaacccatcgtacggccaaggaagtctccaataactgtgatccaccacaagcgccagggttttcccagtcacgacgttgtaaaacgacggccagtcatgcataatccgcacgcatctggaataaggaagtgccattccgcctgacctttgcctatgaggaccaaaacgaaaaaacaccctttcgggtgtcttttctggaatttggtaccgagaggctccatgattcagtatgacttgcctttggtcgaaaaaaaaagcccgcactgtcaggtgcgggcttttttctgtgtttccttattaggacccactttcacatttaagttgtttttctaatccgcatatgatcaattcaaggccgaataagaaggctggctctgcaccttggtgatcaaataattcgatagcttgtcgtaataatggcggcatactatcagtagtaggtgtttccctttcttctttagcgacttgatgctcttgatcttccaatacgcaacctaaagtaaaatgccccacagcgctgagtgcatataatgcattctctagtgaaaaaccttgttggcataaaaaggctaattgattttcgagagtttcatactgtttttctgtaggccgtgtacctaaatgtacttttgctccatcgcgatgacttagtaaagcacatctaaaacttttagcgttattacgtaaaaaatcttgccagctttccccttctaaagggcaaaagtgagtatggtgcctatctaacatctcaatggctaaggcgtcgagcaaagcccgcttattttttacatgccaatacaatgtaggctgctctacacctagcttctgggcgagtttacgggttgttaaaccttcgattccgacctcattaagcagctctaatgcgctgttaatcactttacttttatctaatctggacatattcaccaccctgaattgactctcttccgggcgctatcatgccataccgcgaaaggttttgcgccattcgatggcgcgccgccattgcttgtgcaatgtacatcagagattttgagacacaaccaattattgaaggcctccctaacggggggcctttttttgtttctggtcccccgcttaacgatcgttggctgttttcagcaggacgcactgacctccctatcagtgatagagattgacatccctatcagtgatagagatactgagcacagctgtcaccggatgtgctttccggtctgatgagtccgtgaggacgaaacagcctctacaaataattttgtttaaatcacacgggtaaggaggtatttaaatgaaaacactgtcccaagcacagtcgaagacgagtagccagcagttttctttcaccggtaattctagcgctaacgtgattatcggcaaccagaaactaactatcaacgacgtcgcccgcgttgctcggaacgggaccttagtaagcctgactaacaacactgatatacttcaaggcattcaggcgtcctgtgattatatcaataacgcagttgagtctggtgaaccaatttacggtgtgacctcaggcttcggcggtatggcgaacgttgctatcagccgtgaacaggcctccgaactgcaagagaatattgtatggagtcataaaactggtgctgggaacaaactccctttggcggacgtacgtgcagcaatgctgctgcgcgccaactcgcatatgcgtggcgcgtccggtatccgtctggagctgatcaaacgtatggaaatcttcttgaacgctggtgttactccgtacgtttatgaatttggatctatcggcgcttctggagatctggtcccgctgagctacattacgggttccctgattggccttgacccgagcttcaaggtggatttcaacggcaaagaaatggacgccccgaccgcgttacgccagttaaatctgtctcccctgacacttctgcctaaagaaggtattgctatgttgaatgggacctcagtcatgactggcatcgcagctaactgcgtatacgacacccagatcctgactgcgattgcaatgggtgttcacgctctggatatccaggccctgaacggcaccaaccagtctttccacccgtttatccataactctaagccgcacccaggtcagctgtgggcggctgatcagatgatatcattgctggctaactcgcaactggtacgggacgagctggacggcaaacatgattaccgcgaccacgagctgatccaggatcgttatagcctgcgttgccttccgcagtacctgggtccgattgtggacggtatctcacagatagcaaaacaaatcgaaattgaaattaactccgttactgataaccctctgattgacgtcgataaccaggcgtcgtaccacggcggaaatttcctgggtcagtatgttggcatgggtatggaccaccttcgctactatatcggcctgctggcgaaacacctggatgtgcagattgcgctgctagctagtcccgaatttagcaacggactgccgccatctttattgggcaaccgtgaacgtaaggttaacatgggtctgaaaggtttacaaatctgtggcaattccatcatgccgctgctgacgttctacggcaatagcatcgccgaccgctttccgacccatgcagagcaattcaaccagaatatcaactctcagggctacacctccgcaacgctggcgcgacgtagtgttgatatcttccaaaactacgttgcgattgccctgatgtttggcgtccaggctgtagacctgaggacttataaaaagactggccattacgatgcgcgtgcttgcctctctccggctaccgaacgcctgtattccgccgtgcgtcacgtagttggtcagaaacctacttcagatcgcccatacatctggaacgataacgagcagggtctggatgaacacatcgctcgcatctccgctgacattgccgctggcggagtaattgttcaagctgtacaggatatcctgccgtgcctgcactaaccggcttatcggtcagtttcacctgatttacgtaaaaacccgcttcggcgggtttttgcttttggaggggcagaaagatgaatgactgtccacgacgctatacccaaaagaaa

SEQ ID NO: 329 - DNA, 5122 bp, synthetic construct
  source 1..5122: mol_type = other DNA
aggctaggtggaggctcagtgatgataagtctgcgatggtggatgcatgtgtcatggtcatagctgtttcctgtgtgaaattgttatccgctcagagggcacaatcctattccgcgctatccgacaatctccaagacattaggtggagttcagttcggcgagcggaaatggcttacgaacggggcggagatttcctggaagatgccaggaagatacttaacagggaagtgagagggccgcggcaaagccgtttttccataggctccgcccccctgacaagcatcacgaaatctgacgctcaaatcagtggtggcgaaacccgacaggactataaagataccaggcgtttccccctggcggctccctcgtgcgctctcctgttcctgcctttcggtttaccggtgtcattccgctgttatggccgcgtttgtctcattccacgcctgacactcagttccgggtaggcagttcgctccaagctggactgtatgcacgaaccccccgttcagtccgaccgctgcgccttatccggtaactatcgtcttgagtccaacccggaaagacatgcaaaagcaccactggcagcagccactggtaattgatttagaggagttagtcttgaagtcatgcgccggttaaggctaaactgaaaggacaagttttggtgactgcgctcctccaagccagttacctcggttcaaagagttggtagctcagagaaccttcgaaaaaccgccctgcaaggcggttttttcgttttcagagcaagagattacgcgcagaccaaaacgatctcaagaagatcatcttattaagtctgacgctctattcaacaaagccgccgtccatgggtagggggcttcaaatcgtcctcgtgataccaattcggagcctgcttttttgtacaaacttgttgataatggcaattcaaggatcttcacctagatccttttaaattaaaaatgaagttttaaatcaatctaaagtatatatgagtaaacttggtctgacagttaccaatgcttaatcagtgaggcacctatctcagcgatctgtctatttcgttcatccatagttgcctgactccccgtcgtgtagataactacgatacgggagggcttaccatctggccccagtgctgcaatgataccgcgagagccacgctcaccggctccagatttatcagcaataaaccagccagccggaagggccgagcgcagaagtggtcctgcaactttatccgcctccatccagtctattaattgttgccgggaagctagagtaagtagttcgccagttaatagtttgcgcaacgttgttgccattgctacaggcatcgtggtgtcacgctcgtcgtttggtatggcttcattcagctccggttcccaacgatcaaggcgagttacatgatcccccatgttgtgcaaaaaagcggttagctccttcggtcctccgatcgttgtcagaagtaagttggccgcagtgttatcactcatggttatggcagcactgcataattctcttactgtcatgccatccgtaagatgcttttctgtgactggtgagtactcaaccaagtcattctgagaatagtgtatgcggcgaccgagttgctcttgcccggcgtcaatacgggataataccgcgccacatagcagaactttaaaagtgctcatcattggaaaacgttcttcggggcgaaaactctcaaggatcttaccgctgttgagatccagttcgatgtaacccactcgtgcacccaactgatcttcagcatcttttactttcaccagcgtttctgggtgagcaaaaacaggaaggcaaaatgccgcaaaaaagggaataagggcgacacggaaatgttgaatactcatactcttcctttttcaatattattgaagcatttatcagggttattgtctcatgagcggatacatatttgaatgtatttagaaaaataaacaaataggggttccgcgcacatttccccgaaaagtgccagatacctgaaacaaaacccatcgtacggccaaggaagtctccaataactgtgatccaccacaagcgccagggttttcccagtcacgacgttgtaaaacgacggccagtcatgcataatccgcacgcatctggaataaggaagtgccattccgcctgacctttgcctatgaggaccaaaacgaaaaaacaccctttcgggtgtcttttctggaatttggtaccgagaggctccatgattcagtatgacttgcctttggtcgaaaaaaaaagcccgcactgtcaggtgcgggcttttttctgtgtttccttattaggacccactttcacatttaagttgtttttctaatccgcatatgatcaattcaaggccgaataagaaggctggctctgcaccttggtgatcaaataattcgatagcttgtcgtaataatggcggcatactatcagtagtaggtgtttccctttcttctttagcgacttgatgctcttgatcttccaatacgcaacctaaagtaaaatgccccacagcgctgagtgcatataatgcattctctagtgaaaaaccttgttggcataaaaaggctaattgattttcgagagtttcatactgtttttctgtaggccgtgtacctaaatgtacttttgctccatcgcgatgacttagtaaagcacatctaaaacttttagcgttattacgtaaaaaatcttgccagctttccccttctaaagggcaaaagtgagtatggtgcctatctaacatctcaatggctaaggcgtcgagcaaagcccgcttattttttacatgccaatacaatgtaggctgctctacacctagcttctgggcgagtttacgggttgttaaaccttcgattccgacctcattaagcagctctaatgcgctgttaatcactttacttttatctaatctggacatattcaccaccctgaattgactctcttccgggcgctatcatgccataccgcgaaaggttttgcgccattcgatggcgcgccgccattgcttgtgcaatgtacatcagagattttgagacacaaccaattattgaaggcctccctaacggggggcctttttttgtttctggtcccccgcttaacgatcgttggctgttttcagcaggacgcactgacctccctatcagtgatagagattgacatccctatcagtgatagagatactgagcacagctgtcaccggatgtgctttccggtctgatgagtccgtgaggacgaaacagcctctacaaataattttgtttaaatcacacgggtaaggaggtatttaaatgaaaacactgtcccaagcacagtcgaagacgagtagccagcagttttctttcaccggtaattctagcgctaacgtgattatcggcaaccagaaactaactatcaacgacgtcgcccgcgttgctcggaacgggaccttagtaagcctgactaacaacactgatatacttcaaggcattcaggcgtcctgtgattatatcaataacgcagttgagtctggtgaaccaatttacggtgtgacctcaggcttcggcggtatggcgaacgttgctatcagccgtgaacaggcctccgaactgcaaaagaatatggtatggtttatgaaaactggtgctgggaacaaactccctttggcggacgtacgtgcagcaatgctgctgcgcgccaactcgcatatgcgtggcgcgtccggtatccgtctggagctgatcaaacgtatggaaatcttcttgaacgctggtgttactccgtacgtttatgaatttggatctatcggcgcttctggagatctggtcccgctgagctacattacgggttccctgattggccttgacccgagcttcaaggtggatttcaacggcaaagaaatggacgccccgaccgcgttacgccagttaaatctgtctcccctgacacttctgcctaaagaagcgctagctatgatgaatgggacctcagtcatgactggcatcgcagctaactgcgtatacgacacccagatcctgactgcgattgcaatgggtgttcacgctctggatatccaggccctgaacggcaccaaccagtctttccacccgtttatccataactctaagccgcacccaggtcagctgtgggcggctgatcagatgatatcattgctggctaactcgcaactggtacgggacgagctggacggcaaacatgattaccgcgaccacgagctgatccaggatcgttatagcctgcgttgccttccgcagtacctgggtccgattgtggacggtatctcacagatagcaaaacaaatcgaaattgaaattaactccgttactgataaccctctgattgacgtcgataaccaggcgtcgtaccacggcggaaatttcctgggtcagtatgttggcatgggtatggaccaccttcgctactatatcggcctgctggcgaaacacctggatgtgcagattgcgctgctagctagtcccgaatttagcaacggactgccgccatctttattgggcaaccgtgaacgtaaggttaacatgggtctgaaaggtttacaaatctgtggcaattccatcatgccgctgctgacgttctacggcaatagcatcgccgaccgctttccgacccatgcagagcaattcaaccagaatatcaactctcagggctacacctccgcaacgctggcgcgacgtagtgttgatatcttccaaaactacgttgcgattgccctgatgtttggcgtccaggctgtagacctgaggacttataaaaagactggccattacgatgcgcgtgcttgcctctctccggctaccgaacgcctgtattccgccgtgcgtcacgtagttggtcagaaacctacttcagatcgcccatacatctggaacgataacgagcagggtctggatgaacacatcgctcgcatctccgctgacattgccgctggcggagtaattgttcaagctgtacaggatatcctgccgtgcctgcactaaccggcttatcggtcagtttcacctgatttacgtaaaaacccgcttcggcgggtttttgcttttggaggggcagaaagatgaatgactgtccacgacgctatacccaaaagaaa

SEQ ID NO: 330 - DNA, 5122 bp, synthetic construct
  source 1..5122: mol_type = other DNA
aggctaggtggaggctcagtgatgataagtctgcgatggtggatgcatgtgtcatggtcatagctgtttcctgtgtgaaattgttatccgctcagagggcacaatcctattccgcgctatccgacaatctccaagacattaggtggagttcagttcggcgagcggaaatggcttacgaacggggcggagatttcctggaagatgccaggaagatacttaacagggaagtgagagggccgcggcaaagccgtttttccataggctccgcccccctgacaagcatcacgaaatctgacgctcaaatcagtggtggcgaaacccgacaggactataaagataccaggcgtttccccctggcggctccctcgtgcgctctcctgttcctgcctttcggtttaccggtgtcattccgctgttatggccgcgtttgtctcattccacgcctgacactcagttccgggtaggcagttcgctccaagctggactgtatgcacgaaccccccgttcagtccgaccgctgcgccttatccggtaactatcgtcttgagtccaacccggaaagacatgcaaaagcaccactggcagcagccactggtaattgatttagaggagttagtcttgaagtcatgcgccggttaaggctaaactgaaaggacaagttttggtgactgcgctcctccaagccagttacctcggttcaaagagttggtagctcagagaaccttcgaaaaaccgccctgcaaggcggttttttcgttttcagagcaagagattacgcgcagaccaaaacgatctcaagaagatcatcttattaagtctgacgctctattcaacaaagccgccgtccatgggtagggggcttcaaatcgtcctcgtgataccaattcggagcctgcttttttgtacaaacttgttgataatggcaattcaaggatcttcacctagatccttttaaattaaaaatgaagttttaaatcaatctaaagtatatatgagtaaacttggtctgacagttaccaatgcttaatcagtgaggcacctatctcagcgatctgtctatttcgttcatccatagttgcctgactccccgtcgtgtagataactacgatacgggagggcttaccatctggccccagtgctgcaatgataccgcgagagccacgctcaccggctccagatttatcagcaataaaccagccagccggaagggccgagcgcagaagtggtcctgcaactttatccgcctccatccagtctattaattgttgccgggaagctagagtaagtagttcgccagttaatagtttgcgcaacgttgttgccattgctacaggcatcgtggtgtcacgctcgtcgtttggtatggcttcattcagctccggttcccaacgatcaaggcgagttacatgatcccccatgttgtgcaaaaaagcggttagctccttcggtcctccgatcgttgtcagaagtaagttggccgcagtgttatcactcatggttatggcagcactgcataattctcttactgtcatgccatccgtaagatgcttttctgtgactggtgagtactcaaccaagtcattctgagaatagtgtatgcggcgaccgagttgctcttgcccggcgtcaatacgggataataccgcgccacatagcagaactttaaaagtgctcatcattggaaaacgttcttcggggcgaaaactctcaaggatcttaccgctgttgagatccagttcgatgtaacccactcgtgcacccaactgatcttcagcatcttttactttcaccagcgtttctgggtgagcaaaaacaggaaggcaaaatgccgcaaaaaagggaataagggcgacacggaaatgttgaatactcatactcttcctttttcaatattattgaagcatttatcagggttattgtctcatgagcggatacatatttgaatgtatttagaaaaataaacaaataggggttccgcgcacatttccccgaaaagtgccagatacctgaaacaaaacccatcgtacggccaaggaagtctccaataactgtgatccaccacaagcgccagggttttcccagtcacgacgttgtaaaacgacggccagtcatgcataatccgcacgcatctggaataaggaagtgccattccgcctgacctttgcctatgaggaccaaaacgaaaaaacaccctttcgggtgtcttttctggaatttggtaccgagaggctccatgattcagtatgacttgcctttggtcgaaaaaaaaagcccgcactgtcaggtgcgggcttttttctgtgtttccttattaggacccactttcacatttaagttgtttttctaatccgcatatgatcaattcaaggccgaataagaaggctggctctgcaccttggtgatcaaataattcgatagcttgtcgtaataatggcggcatactatcagtagtaggtgtttccctttcttctttagcgacttgatgctcttgatcttccaatacgcaacctaaagtaaaatgccccacagcgctgagtgcatataatgcattctctagtgaaaaaccttgttggcataaaaaggctaattgattttcgagagtttcatactgtttttctgtaggccgtgtacctaaatgtacttttgctccatcgcgatgacttagtaaagcacatctaaaacttttagcgttattacgtaaaaaatcttgccagctttccccttctaaagggcaaaagtgagtatggtgcctatctaacatctcaatggctaaggcgtcgagcaaagcccgcttattttttacatgccaatacaatgtaggctgctctacacctagcttctgggcgagtttacgggttgttaaaccttcgattccgacctcattaagcagctctaatgcgctgttaatcactttacttttatctaatctggacatattcaccaccctgaattgactctcttccgggcgctatcatgccataccgcgaaaggttttgcgccattcgatggcgcgccgccattgcttgtgcaatgtacatcagagattttgagacacaaccaattattgaaggcctccctaacggggggcctttttttgtttctggtcccccgcttaacgatcgttggctgttttcagcaggacgcactgacctccctatcagtgatagagattgacatccctatcagtgatagagatactgagcacagctgtcaccggatgtgctttccggtctgatgagtccgtgaggacgaaacagcctctacaaataattttgtttaaatcacacgggtaaggaggtatttaaatgaaaacactgtcccaagcacagtcgaagacgagtagccagcagttttctttcaccggtaattctagcgctaacgtgattatcggcaaccagaaactaactatcaacgacgtcgcccgcgttgctcggaacgggaccttagtaagcctgactaacaacactgatatacttcaaggcattcaggcgtcctgtgattatatcaataacgcagttgagtctggtgaaccaatttacggtgtgacctcaggcttcggcggtatggcgaacgttgctatcagccgtgaacaggcctccgaactgcaagagaatttggtatggtatacgaaaactggtgctgggaacaaactccctttggcggacgtacgtgcagcaatgctgctgcgcgccaactcgcatatgcgtggcgcgtccggtatccgtctggagctgatcaaacgtatggaaatcttcttgaacgctggtgttactccgtacgtttatgaatttggatctatcggcgcttctggagatctggtcccgctgagctacattacgggttccctgattggccttgacccgagcttcaaggtggatttcaacggcaaagaaatggacgccccgaccgcgttacgccagttaaatctgtctcccctgacacttctgcctaaagaagccattgctatgattaatgggacctcagtcatgactggcatcgcagctaactgcgtatacgacacccagatcctgactgcgattgcaatgggtgttcacgctctggatatccaggccctgaacggcaccaaccagtctttccacccgtttatccataactctaagccgcacccaggtcagctgtgggcggctgatcagatgatatcattgctggctaactcgcaactggtacgggacgagctggacggcaaacatgattaccgcgaccacgagctgatccaggatcgttatagcctgcgttgccttccgcagtacctgggtccgattgtggacggtatctcacagatagcaaaacaaatcgaaattgaaattaactccgttactgataaccctctgattgacgtcgataaccaggcgtcgtaccacggcggaaatttcctgggtcagtatgttggcatgggtatggaccaccttcgctactatatcggcctgctggcgaaacacctggatgtgcagattgcgctgctagctagtcccgaatttagcaacggactgccgccatctttattgggcaaccgtgaacgtaaggttaacatgggtctgaaaggtttacaaatctgtggcaattccatcatgccgctgctgacgttctacggcaatagcatcgccgaccgctttccgacccatgcagagcaattcaaccagaatatcaactctcagggctacacctccgcaacgctggcgcgacgtagtgttgatatcttccaaaactacgttgcgattgccctgatgtttggcgtccaggctgtagacctgaggacttataaaaagactggccattacgatgcgcgtgcttgcctctctccggctaccgaacgcctgtattccgccgtgcgtcacgtagttggtcagaaacctacttcagatcgcccatacatctggaacgataacgagcagggtctggatgaacacatcgctcgcatctccgctgacattgccgctggcggagtaattgttcaagctgtacaggatatcctgccgtgcctgcactaaccggcttatcggtcagtttcacctgatttacgtaaaaacccgcttcggcgggtttttgcttttggaggggcagaaagatgaatgactgtccacgacgctatacccaaaagaaa

SEQ ID NO: 331 - DNA, 5122 bp, synthetic construct
  source 1..5122: mol_type = other DNA
aggctaggtggaggctcagtgatgataagtctgcgatggtggatgcatgtgtcatggtcatagctgtttcctgtgtgaaattgttatccgctcagagggcacaatcctattccgcgctatccgacaatctccaagacattaggtggagttcagttcggcgagcggaaatggcttacgaacggggcggagatttcctggaagatgccaggaagatacttaacagggaagtgagagggccgcggcaaagccgtttttccataggctccgcccccctgacaagcatcacgaaatctgacgctcaaatcagtggtggcgaaacccgacaggactataaagataccaggcgtttccccctggcggctccctcgtgcgctctcctgttcctgcctttcggtttaccggtgtcattccgctgttatggccgcgtttgtctcattccacgcctgacactcagttccgggtaggcagttcgctccaagctggactgtatgcacgaaccccccgttcagtccgaccgctgcgccttatccggtaactatcgtcttgagtccaacccggaaagacatgcaaaagcaccactggcagcagccactggtaattgatttagaggagttagtcttgaagtcatgcgccggttaaggctaaactgaaaggacaagttttggtgactgcgctcctccaagccagttacctcggttcaaagagttggtagctcagagaaccttcgaaaaaccgccctgcaaggcggttttttcgttttcagagcaagagattacgcgcagaccaaaacgatctcaagaagatcatcttattaagtctgacgctctattcaacaaagccgccgtccatgggtagggggcttcaaatcgtcctcgtgataccaattcggagcctgcttttttgtacaaacttgttgataatggcaattcaaggatcttcacctagatccttttaaattaaaaatgaagttttaaatcaatctaaagtatatatgagtaaacttggtctgacagttaccaatgcttaatcagtgaggcacctatctcagcgatctgtctatttcgttcatccatagttgcctgactccccgtcgtgtagataactacgatacgggagggcttaccatctggccccagtgctgcaatgataccgcgagagccacgctcaccggctccagatttatcagcaataaaccagccagccggaagggccgagcgcagaagtggtcctgcaactttatccgcctccatccagtctattaattgttgccgggaagctagagtaagtagttcgccagttaatagtttgcgcaacgttgttgccattgctacaggcatcgtggtgtcacgctcgtcgtttggtatggcttcattcagctccggttcccaacgatcaaggcgagttacatgatcccccatgttgtgcaaaaaagcggttagctccttcggtcctccgatcgttgtcagaagtaagttggccgcagtgttatcactcatggttatggcagcactgcataattctcttactgtcatgccatccgtaagatgcttttctgtgactggtgagtactcaaccaagtcattctgagaatagtgtatgcggcgaccgagttgctcttgcccggcgtcaatacgggataataccgcgccacatagcagaactttaaaagtgctcatcattggaaaacgttcttcggggcgaaaactctcaaggatcttaccgctgttgagatccagttcgatgtaacccactcgtgcacccaactgatcttcagcatcttttactttcaccagcgtttctgggtgagcaaaaacaggaaggcaaaatgccgcaaaaaagggaataagggcgacacggaaatgttgaatactcatactcttcctttttcaatattattgaagcatttatcagggttattgtctcatgagcggatacatatttgaatgtatttagaaaaataaacaaataggggttccgcgcacatttccccgaaaagtgccagatacctgaaacaaaacccatcgtacggccaaggaagtctccaataactgtgatccaccacaagcgccagggttttcccagtcacgacgttgtaaaacgacggccagtcatgcataatccgcacgcatctggaataaggaagtgccattccgcctgacctttgcctatgaggaccaaaacgaaaaaacaccctttcgggtgtcttttctggaatttggtaccgagaggctccatgattcagtatgacttgcctttggtcgaaaaaaaaagcccgcactgtcaggtgcgggcttttttctgtgtttccttattaggacccactttcacatttaagttgtttttctaatccgcatatgatcaattcaaggccgaataagaaggctggctctgcaccttggtgatcaaataattcgatagcttgtcgtaataatggcggcatactatcagtagtaggtgtttccctttcttctttagcgacttgatgctcttgatcttccaatacgcaacctaaagtaaaatgccccacagcgctgagtgcatataatgcattctctagtgaaaaaccttgttggcataaaaaggctaattgattttcgagagtttcatactgtttttctgtaggccgtgtacctaaatgtacttttgctccatcgcgatgacttagtaaagcacatctaaaacttttagcgttattacgtaaaaaatcttgccagctttccccttctaaagggcaaaagtgagtatggtgcctatctaacatctcaatggctaaggcgtcgagcaaagcccgcttattttttacatgccaatacaatgtaggctgctctacacctagcttctgggcgagtttacgggttgttaaaccttcgattccgacctcattaagcagctctaatgcgctgttaatcactttacttttatctaatctggacatattcaccaccctgaattgactctcttccgggcgctatcatgccataccgcgaaaggttttgcgccattcgatggcgcgccgccattgcttgtgcaatgtacatcagagattttgagacacaaccaattattgaaggcctccctaacggggggcctttttttgtttctggtcccccgcttaacgatcgttggctgttttcagcaggacgcactgacctccctatcagtgatagagattgacatccctatcagtgatagagatactgagcacagctgtcaccggatgtgctttccggtctgatgagtccgtgaggacgaaacagcctctacaaataattttgtttaaatcacacgggtaaggaggtatttaaatgaaaacactgtcccaagcacagtcgaagacgagtagccagcagttttctttcaccggtaattctagcgctaacgtgattatcggcaaccagaaactaactatcaacgacgtcgcccgcgttgctcggaacgggaccttagtaagcctgactaacaacactgatatacttcaaggcattcaggcgtcctgtgattatatcaataacgcagttgagtctggtgaaccaatttacggtgtgacctcaggcttcggcggtatggcgaacgttgctatcagccgtgaacaggcctccgaactgcaaagtaatattgtatggcatgtgaaaactggtgctgggaacaaactccctttggcggacgtacgtgcagcaatgctgctgcgcgccaactcgcatatgcgtggcgcgtccggtatccgtctggagctgatcaaacgtatggaaatcttcttgaacgctggtgttactccgtacgtttatgaatttggatctatcggcgcttctggagatctggtcccgctgagctacattacgggttccctgattggccttgacccgagcttcaaggtggatttcaacggcaaagaaatggacgccccgaccgcgttacgccagttaaatctgtctcccctgacacttctgcctaaagaaggtctagctatgctcaatgggacctcagtcatgactggcatcgcagctaactgcgtatacgacacccagatcctgactgcgattgcaatgggtgttcacgctctggatatccaggccctgaacggcaccaaccagtctttccacccgtttatccataactctaagccgcacccaggtcagctgtgggcggctgatcagatgatatcattgctggctaactcgcaactggtacgggacgagctggacggcaaacatgattaccgcgaccacgagctgatccaggatcgttatagcctgcgttgccttccgcagtacctgggtccgattgtggacggtatctcacagatagcaaaacaaatcgaaattgaaattaactccgttactgataaccctctgattgacgtcgataaccaggcgtcgtaccacggcggaaatttcctgggtcagtatgttggcatgggtatggaccaccttcgctactatatcggcctgctggcgaaacacctggatgtgcagattgcgctgctagctagtcccgaatttagcaacggactgccgccatctttattgggcaaccgtgaacgtaaggttaacatgggtctgaaaggtttacaaatctgtggcaattccatcatgccgctgctgacgttctacggcaatagcatcgccgaccgctttccgacccatgcagagcaattcaaccagaatatcaactctcagggctacacctccgcaacgctggcgcgacgtagtgttgatatcttccaaaactacgttgcgattgccctgatgtttggcgtccaggctgtagacctgaggacttataaaaagactggccattacgatgcgcgtgcttgcctctctccggctaccgaacgcctgtattccgccgtgcgtcacgtagttggtcagaaacctacttcagatcgcccatacatctggaacgataacgagcagggtctggatgaacacatcgctcgcatctccgctgacattgccgctggcggagtaattgttcaagctgtacaggatatcctgccgtgcctgcactaaccggcttatcggtcagtttcacctgatttacgtaaaaacccgcttcggcgggtttttgcttttggaggggcagaaagatgaatgactgtccacgacgctatacccaaaagaaa

SEQ ID NO: 332 - DNA, 5122 bp, synthetic construct
  source 1..5122: mol_type = other DNA
aggctaggtggaggctcagtgatgataagtctgcgatggtggatgcatgtgtcatggtcatagctgtttcctgtgtgaaattgttatccgctcagagggcacaatcctattccgcgctatccgacaatctccaagacattaggtggagttcagttcggcgagcggaaatggcttacgaacggggcggagatttcctggaagatgccaggaagatacttaacagggaagtgagagggccgcggcaaagccgtttttccataggctccgcccccctgacaagcatcacgaaatctgacgctcaaatcagtggtggcgaaacccgacaggactataaagataccaggcgtttccccctggcggctccctcgtgcgctctcctgttcctgcctttcggtttaccggtgtcattccgctgttatggccgcgtttgtctcattccacgcctgacactcagttccgggtaggcagttcgctccaagctggactgtatgcacgaaccccccgttcagtccgaccgctgcgccttatccggtaactatcgtcttgagtccaacccggaaagacatgcaaaagcaccactggcagcagccactggtaattgatttagaggagttagtcttgaagtcatgcgccggttaaggctaaactgaaaggacaagttttggtgactgcgctcctccaagccagttacctcggttcaaagagttggtagctcagagaaccttcgaaaaaccgccctgcaaggcggttttttcgttttcagagcaagagattacgcgcagaccaaaacgatctcaagaagatcatcttattaagtctgacgctctattcaacaaagccgccgtccatgggtagggggcttcaaatcgtcctcgtgataccaattcggagcctgcttttttgtacaaacttgttgataatggcaattcaaggatcttcacctagatccttttaaattaaaaatgaagttttaaatcaatctaaagtatatatgagtaaacttggtctgacagttaccaatgcttaatcagtgaggcacctatctcagcgatctgtctatttcgttcatccatagttgcctgactccccgtcgtgtagataactacgatacgggagggcttaccatctggccccagtgctgcaatgataccgcgagagccacgctcaccggctccagatttatcagcaataaaccagccagccggaagggccgagcgcagaagtggtcctgcaactttatccgcctccatccagtctattaattgttgccgggaagctagagtaagtagttcgccagttaatagtttgcgcaacgttgttgccattgctacaggcatcgtggtgtcacgctcgtcgtttggtatggcttcattcagctccggttcccaacgatcaaggcgagttacatgatcccccatgttgtgcaaaaaagcggttagctccttcggtcctccgatcgttgtcagaagtaagttggccgcagtgttatcactcatggttatggcagcactgcataattctcttactgtcatgccatccgtaagatgcttttctgtgactggtgagtactcaaccaagtcattctgagaatagtgtatgcggcgaccgagttgctcttgcccggcgtcaatacgggataataccgcgccacatagcagaactttaaaagtgctcatcattggaaaacgttcttcggggcgaaaactctcaaggatcttaccgctgttgagatccagttcgatgtaacccactcgtgcacccaactgatcttcagcatcttttactttcaccagcgtttctgggtgagcaaaaacaggaaggcaaaatgccgcaaaaaagggaataagggcgacacggaaatgttgaatactcatactcttcctttttcaatattattgaagcatttatcagggttattgtctcatgagcggatacatatttgaatgtatttagaaaaataaacaaataggggttccgcgcacatttccccgaaaagtgccagatacctgaaacaaaacccatcgtacggccaaggaagtctccaataactgtgatccaccacaagcgccagggttttcccagtcacgacgttgtaaaacgacggccagtcatgcataatccgcacgcatctggaataaggaagtgccattccgcctgacctttgcctatgaggaccaaaacgaaaaaacaccctttcgggtgtcttttctggaatttggtaccgagaggctccatgattcagtatgacttgcctttggtcgaaaaaaaaagcccgcactgtcaggtgcgggcttttttctgtgtttccttattaggacccactttcacatttaagttgtttttctaatccgcatatgatcaattcaaggccgaataagaaggctggctctgcaccttggtgatcaaataattcgatagcttgtcgtaataatggcggcatactatcagtagtaggtgtttccctttcttctttagcgacttgatgctcttgatcttccaatacgcaacctaaagtaaaatgccccacagcgctgagtgcatataatgcattctctagtgaaaaaccttgttggcataaaaaggctaattgattttcgagagtttcatactgtttttctgtaggccgtgtacctaaatgtacttttgctccatcgcgatgacttagtaaagcacatctaaaacttttagcgttattacgtaaaaaatcttgccagctttccccttctaaagggcaaaagtgagtatggtgcctatctaacatctcaatggctaaggcgtcgagcaaagcccgcttattttttacatgccaatacaatgtaggctgctctacacctagcttctgggcgagtttacgggttgttaaaccttcgattccgacctcattaagcagctctaatgcgctgttaatcactttacttttatctaatctggacatattcaccaccctgaattgactctcttccgggcgctatcatgccataccgcgaaaggttttgcgccattcgatggcgcgccgccattgcttgtgcaatgtacatcagagattttgagacacaaccaattattgaaggcctccctaacggggggcctttttttgtttctggtcccccgcttaacgatcgttggctgttttcagcaggacgcactgacctccctatcagtgatagagattgacatccctatcagtgatagagatactgagcacagctgtcaccggatgtgctttccggtctgatgagtccgtgaggacgaaacagcctctacaaataattttgtttaaatcacacgggtaaggaggtatttaaatgaaaacactgtcccaagcacagtcgaagacgagtagccagcagttttctttcaccggtaattctagcgctaacgtgattatcggcaaccagaaactaactatcaacgacgtcgcccgcgttgctcggaacgggaccttagtaagcctgactaacaacactgatatacttcaaggcattcaggcgtcctgtgattatatcaataacgcagttgagtctggtgaaccaatttacggtgtgacctcaggcttcggcggtatggcgaacgttgctatcagccgtgaacaggcctccgaactgcaaaagaatttggtatggtttatgaaaactggtgctgggaacaaactccctttggcggacgtacgtgcagcaatgctgctgcgcgccaactcgcatatgcgtggcgcgtccggtatccgtctggagctgatcaaacgtatggaaatcttcttgaacgctggtgttactccgtacgtttatgaatttggatctatcggcgcttctggagatctggtcccgctgagctacattacgggttccctgattggccttgacccgagcttcaaggtggatttcaacggcaaagaaatggacgccccgaccgcgttacgccagttaaatctgtctcccctgacacttctgcctaaagaagccatagctatgctcaatgggacctcagtcatgactggcatcgcagctaactgcgtatacgacacccagatcctgactgcgattgcaatgggtgttcacgctctggatatccaggccctgaacggcaccaaccagtctttccacccgtttatccataactctaagccgcacccaggtcagctgtgggcggctgatcagatgatatcattgctggctaactcgcaactggtacgggacgagctggacggcaaacatgattaccgcgaccacgagctgatccaggatcgttatagcctgcgttgccttccgcagtacctgggtccgattgtggacggtatctcacagatagcaaaacaaatcgaaattgaaattaactccgttactgataaccctctgattgacgtcgataaccaggcgtcgtaccacggcggaaatttcctgggtcagtatgttggcatgggtatggaccaccttcgctactatatcggcctgctggcgaaacacctggatgtgcagattgcgctgctagctagtcccgaatttagcaacggactgccgccatctttattgggcaaccgtgaacgtaaggttaacatgggtctgaaaggtttacaaatctgtggcaattccatcatgccgctgctgacgttctacggcaatagcatcgccgaccgctttccgacccatgcagagcaattcaaccagaatatcaactctcagggctacacctccgcaacgctggcgcgacgtagtgttgatatcttccaaaactacgttgcgattgccctgatgtttggcgtccaggctgtagacctgaggacttataaaaagactggccattacgatgcgcgtgcttgcctctctccggctaccgaacgcctgtattccgccgtgcgtcacgtagttggtcagaaacctacttcagatcgcccatacatctggaacgataacgagcagggtctggatgaacacatcgctcgcatctccgctgacattgccgctggcggagtaattgttcaagctgtacaggatatcctgccgtgcctgcactaaccggcttatcggtcagtttcacctgatttacgtaaaaacccgcttcggcgggtttttgcttttggaggggcagaaagatgaatgactgtccacgacgctatacccaaaagaaa

SEQ ID NO: 333 - DNA, 5122 bp, synthetic construct
  source 1..5122: mol_type = other DNA
aggctaggtggaggctcagtgatgataagtctgcgatggtggatgcatgtgtcatggtcatagctgtttcctgtgtgaaattgttatccgctcagagggcacaatcctattccgcgctatccgacaatctccaagacattaggtggagttcagttcggcgagcggaaatggcttacgaacggggcggagatttcctggaagatgccaggaagatacttaacagggaagtgagagggccgcggcaaagccgtttttccataggctccgcccccctgacaagcatcacgaaatctgacgctcaaatcagtggtggcgaaacccgacaggactataaagataccaggcgtttccccctggcggctccctcgtgcgctctcctgttcctgcctttcggtttaccggtgtcattccgctgttatggccgcgtttgtctcattccacgcctgacactcagttccgggtaggcagttcgctccaagctggactgtatgcacgaaccccccgttcagtccgaccgctgcgccttatccggtaactatcgtcttgagtccaacccggaaagacatgcaaaagcaccactggcagcagccactggtaattgatttagaggagttagtcttgaagtcatgcgccggttaaggctaaactgaaaggacaagttttggtgactgcgctcctccaagccagttacctcggttcaaagagttggtagctcagagaaccttcgaaaaaccgccctgcaaggcggttttttcgttttcagagcaagagattacgcgcagaccaaaacgatctcaagaagatcatcttattaagtctgacgctctattcaacaaagccgccgtccatgggtagggggcttcaaatcgtcctcgtgataccaattcggagcctgcttttttgtacaaacttgttgataatggcaattcaaggatcttcacctagatccttttaaattaaaaatgaagttttaaatcaatctaaagtatatatgagtaaacttggtctgacagttaccaatgcttaatcagtgaggcacctatctcagcgatctgtctatttcgttcatccatagttgcctgactccccgtcgtgtagataactacgatacgggagggcttaccatctggccccagtgctgcaatgataccgcgagagccacgctcaccggctccagatttatcagcaataaaccagccagccggaagggccgagcgcagaagtggtcctgcaactttatccgcctccatccagtctattaattgttgccgggaagctagagtaagtagttcgccagttaatagtttgcgcaacgttgttgccattgctacaggcatcgtggtgtcacgctcgtcgtttggtatggcttcattcagctccggttcccaacgatcaaggcgagttacatgatcccccatgttgtgcaaaaaagcggttagctccttcggtcctccgatcgttgtcagaagtaagttggccgcagtgttatcactcatggttatggcagcactgcataattctcttactgtcatgccatccgtaagatgcttttctgtgactggtgagtactcaaccaagtcattctgagaatagtgtatgcggcgaccgagttgctcttgcccggcgtcaatacgggataataccgcgccacatagcagaactttaaaagtgctcatcattggaaaacgttcttcggggcgaaaactctcaaggatcttaccgctgttgagatccagttcgatgtaacccactcgtgcacccaactgatcttcagcatcttttactttcaccagcgtttctgggtgagcaaaaacaggaaggcaaaatgccgcaaaaaagggaataagggcgacacggaaatgttgaatactcatactcttcctttttcaatattattgaagcatttatcagggttattgtctcatgagcggatacatatttgaatgtatttagaaaaataaacaaataggggttccgcgcacatttccccgaaaagtgccagatacctgaaacaaaacccatcgtacggccaaggaagtctccaataactgtgatccaccacaagcgccagggttttcccagtcacgacgttgtaaaacgacggccagtcatgcataatccgcacgcatctggaataaggaagtgccattccgcctgacctttgcctatgaggaccaaaacgaaaaaacaccctttcgggtgtcttttctggaatttggtaccgagaggctccatgattcagtatgacttgcctttggtcgaaaaaaaaagcccgcactgtcaggtgcgggcttttttctgtgtttccttattaggacccactttcacatttaagttgtttttctaatccgcatatgatcaattcaaggccgaataagaaggctggctctgcaccttggtgatcaaataattcgatagcttgtcgtaataatggcggcatactatcagtagtaggtgtttccctttcttctttagcgacttgatgctcttgatcttccaatacgcaacctaaagtaaaatgccccacagcgctgagtgcatataatgcattctctagtgaaaaaccttgttggcataaaaaggctaattgattttcgagagtttcatactgtttttctgtaggccgtgtacctaaatgtacttttgctccatcgcgatgacttagtaaagcacatctaaaacttttagcgttattacgtaaaaaatcttgccagctttccccttctaaagggcaaaagtgagtatggtgcctatctaacatctcaatggctaaggcgtcgagcaaagcccgcttattttttacatgccaatacaatgtaggctgctctacacctagcttctgggcgagtttacgggttgttaaaccttcgattccgacctcattaagcagctctaatgcgctgttaatcactttacttttatctaatctggacatattcaccaccctgaattgactctcttccgggcgctatcatgccataccgcgaaaggttttgcgccattcgatggcgcgccgccattgcttgtgcaatgtacatcagagattttgagacacaaccaattattgaaggcctccctaacggggggcctttttttgtttctggtcccccgcttaacgatcgttggctgttttcagcaggacgcactgacctccctatcagtgatagagattgacatccctatcagtgatagagatactgagcacagctgtcaccggatgtgctttccggtctgatgagtccgtgaggacgaaacagcctctacaaataattttgtttaaatcacacgggtaaggaggtatttaaatgaaaacactgtcccaagcacagtcgaagacgagtagccagcagttttctttcaccggtaattctagcgctaacgtgattatcggcaaccagaaactaactatcaacgacgtcgcccgcgttgctcggaacgggaccttagtaagcctgactaacaacactgatatacttcaaggcattcaggcgtcctgtgattatatcaataacgcagttgagtctggtgaaccaatttacggtgtgacctcaggcttcggcggtatggcgaacgttgctatcagccgtgaacaggcctccgaactgcaaagtaatttggtatggagtcataaaactggtgctgggaacaaactccctttggcggacgtacgtgcagcaatgctgctgcgcgccaactcgcatatgcgtggcgcgtccggtatccgtctggagctgatcaaacgtatggaaatcttcttgaacgctggtgttactccgtacgtttatgaatttggatctatcggcgcttctggagatctggtcccgctgagctacattacgggttccctgattggccttgacccgagcttcaaggtggatttcaacggcaaagaaatggacgccccgaccgcgttacgccagttaaatctgtctcccctgacacttctgcctaaagaatcactagctatggtgaatgggacctcagtcatgactggcatcgcagctaactgcgtatacgacacccagatcctgactgcgattgcaatgggtgttcacgctctggatatccaggccctgaacggcaccaaccagtctttccacccgtttatccataactctaagccgcacccaggtcagctgtgggcggctgatcagatgatatcattgctggctaactcgcaactggtacgggacgagctggacggcaaacatgattaccgcgaccacgagctgatccaggatcgttatagcctgcgttgccttccgcagtacctgggtccgattgtggacggtatctcacagatagcaaaacaaatcgaaattgaaattaactccgttactgataaccctctgattgacgtcgataaccaggcgtcgtaccacggcggaaatttcctgggtcagtatgttggcatgggtatggaccaccttcgctactatatcggcctgctggcgaaacacctggatgtgcagattgcgctgctagctagtcccgaatttagcaacggactgccgccatctttattgggcaaccgtgaacgtaaggttaacatgggtctgaaaggtttacaaatctgtggcaattccatcatgccgctgctgacgttctacggcaatagcatcgccgaccgctttccgacccatgcagagcaattcaaccagaatatcaactctcagggctacacctccgcaacgctggcgcgacgtagtgttgatatcttccaaaactacgttgcgattgccctgatgtttggcgtccaggctgtagacctgaggacttataaaaagactggccattacgatgcgcgtgcttgcctctctccggctaccgaacgcctgtattccgccgtgcgtcacgtagttggtcagaaacctacttcagatcgcccatacatctggaacgataacgagcagggtctggatgaacacatcgctcgcatctccgctgacattgccgctggcggagtaattgttcaagctgtacaggatatcctgccgtgcctgcactaaccggcttatcggtcagtttcacctgatttacgtaaaaacccgcttcggcgggtttttgcttttggaggggcagaaagatgaatgactgtccacgacgctatacccaaaagaaa

SEQ ID NO: 334 - DNA, 5122 bp, synthetic construct
  source 1..5122: mol_type = other DNA
aggctaggtggaggctcagtgatgataagtctgcgatggtggatgcatgtgtcatggtcatagctgtttcctgtgtgaaattgttatccgctcagagggcacaatcctattccgcgctatccgacaatctccaagacattaggtggagttcagttcggcgagcggaaatggcttacgaacggggcggagatttcctggaagatgccaggaagatacttaacagggaagtgagagggccgcggcaaagccgtttttccataggctccgcccccctgacaagcatcacgaaatctgacgctcaaatcagtggtggcgaaacccgacaggactataaagataccaggcgtttccccctggcggctccctcgtgcgctctcctgttcctgcctttcggtttaccggtgtcattccgctgttatggccgcgtttgtctcattccacgcctgacactcagttccgggtaggcagttcgctccaagctggactgtatgcacgaaccccccgttcagtccgaccgctgcgccttatccggtaactatcgtcttgagtccaacccggaaagacatgcaaaagcaccactggcagcagccactggtaattgatttagaggagttagtcttgaagtcatgcgccggttaaggctaaactgaaaggacaagttttggtgactgcgctcctccaagccagttacctcggttcaaagagttggtagctcagagaaccttcgaaaaaccgccctgcaaggcggttttttcgttttcagagcaagagattacgcgcagaccaaaacgatctcaagaagatcatcttattaagtctgacgctctattcaacaaagccgccgtccatgggtagggggcttcaaatcgtcctcgtgataccaattcggagcctgcttttttgtacaaacttgttgataatggcaattcaaggatcttcacctagatccttttaaattaaaaatgaagttttaaatcaatctaaagtatatatgagtaaacttggtctgacagttaccaatgcttaatcagtgaggcacctatctcagcgatctgtctatttcgttcatccatagttgcctgactccccgtcgtgtagataactacgatacgggagggcttaccatctggccccagtgctgcaatgataccgcgagagccacgctcaccggctccagatttatcagcaataaaccagccagccggaagggccgagcgcagaagtggtcctgcaactttatccgcctccatccagtctattaattgttgccgggaagctagagtaagtagttcgccagttaatagtttgcgcaacgttgttgccattgctacaggcatcgtggtgtcacgctcgtcgtttggtatggcttcattcagctccggttcccaacgatcaaggcgagttacatgatcccccatgttgtgcaaaaaagcggttagctccttcggtcctccgatcgttgtcagaagtaagttggccgcagtgttatcactcatggttatggcagcactgcataattctcttactgtcatgccatccgtaagatgcttttctgtgactggtgagtactcaaccaagtcattctgagaatagtgtatgcggcgaccgagttgctcttgcccggcgtcaatacgggataataccgcgccacatagcagaactttaaaagtgctcatcattggaaaacgttcttcggggcgaaaactctcaaggatcttaccgctgttgagatccagttcgatgtaacccactcgtgcacccaactgatcttcagcatcttttactttcaccagcgtttctgggtgagcaaaaacaggaaggcaaaatgccgcaaaaaagggaataagggcgacacggaaatgttgaatactcatactcttcctttttcaatattattgaagcatttatcagggttattgtctcatgagcggatacatatttgaatgtatttagaaaaataaacaaataggggttccgcgcacatttccccgaaaagtgccagatacctgaaacaaaacccatcgtacggccaaggaagtctccaataactgtgatccaccacaagcgccagggttttcccagtcacgacgttgtaaaacgacggccagtcatgcataatccgcacgcatctggaataaggaagtgccattccgcctgacctttgcctatgaggaccaaaacgaaaaaacaccctttcgggtgtcttttctggaatttggtaccgagaggctccatgattcagtatgacttgcctttggtcgaaaaaaaaagcccgcactgtcaggtgcgggcttttttctgtgtttccttattaggacccactttcacatttaagttgtttttctaatccgcatatgatcaattcaaggccgaataagaaggctggctctgcaccttggtgatcaaataattcgatagcttgtcgtaataatggcggcatactatcagtagtaggtgtttccctttcttctttagcgacttgatgctcttgatcttccaatacgcaacctaaagtaaaatgccccacagcgctgagtgcatataatgcattctctagtgaaaaaccttgttggcataaaaaggctaattgattttcgagagtttcatactgtttttctgtaggccgtgtacctaaatgtacttttgctccatcgcgatgacttagtaaagcacatctaaaacttttagcgttattacgtaaaaaatcttgccagctttccccttctaaagggcaaaagtgagtatggtgcctatctaacatctcaatggctaaggcgtcgagcaaagcccgcttattttttacatgccaatacaatgtaggctgctctacacctagcttctgggcgagtttacgggttgttaaaccttcgattccgacctcattaagcagctctaatgcgctgttaatcactttacttttatctaatctggacatattcaccaccctgaattgactctcttccgggcgctatcatgccataccgcgaaaggttttgcgccattcgatggcgcgccgccattgcttgtgcaatgtacatcagagattttgagacacaaccaattattgaaggcctccctaacggggggcctttttttgtttctggtcccccgcttaacgatcgttggctgttttcagcaggacgcactgacctccctatcagtgatagagattgacatccctatcagtgatagagatactgagcacagctgtcaccggatgtgctttccggtctgatgagtccgtgaggacgaaacagcctctacaaataattttgtttaaatcacacgggtaaggaggtatttaaatgaaaacactgtcccaagcacagtcgaagacgagtagccagcagttttctttcaccggtaattctagcgctaacgtgattatcggcaaccagaaactaactatcaacgacgtcgcccgcgttgctcggaacgggaccttagtaagcctgactaacaacactgatatacttcaaggcattcaggcgtcctgtgattatatcaataacgcagttgagtctggtgaaccaatttacggtgtgacctcaggcttcggcggtatggcgaacgttgctatcagccgtgaacaggcctccgaactgcaacacaatttggtatggtttcataaaactggtgctgggaacaaactccctttggcggacgtacgtgcagcaatgctgctgcgcgccaactcgcatatgcgtggcgcgtccggtatccgtctggagctgatcaaacgtatggaaatcttcttgaacgctggtgttactccgtacgtttatgaatttggatctatcggcgcttctggagatctggtcccgctgagctacattacgggttccctgattggccttgacccgagcttcaaggtggatttcaacggcaaagaaatggacgccccgaccgcgttacgccagttaaatctgtctcccctgacacttctgcctaaagaaggtattgctatgctcaatgggacctcagtcatgactggcatcgcagctaactgcgtatacgacacccagatcctgactgcgattgcaatgggtgttcacgctctggatatccaggccctgaacggcaccaaccagtctttccacccgtttatccataactctaagccgcacccaggtcagctgtgggcggctgatcagatgatatcattgctggctaactcgcaactggtacgggacgagctggacggcaaacatgattaccgcgaccacgagctgatccaggatcgttatagcctgcgttgccttccgcagtacctgggtccgattgtggacggtatctcacagatagcaaaacaaatcgaaattgaaattaactccgttactgataaccctctgattgacgtcgataaccaggcgtcgtaccacggcggaaatttcctgggtcagtatgttggcatgggtatggaccaccttcgctactatatcggcctgctggcgaaacacctggatgtgcagattgcgctgctagctagtcccgaatttagcaacggactgccgccatctttattgggcaaccgtgaacgtaaggttaacatgggtctgaaaggtttacaaatctgtggcaattccatcatgccgctgctgacgttctacggcaatagcatcgccgaccgctttccgacccatgcagagcaattcaaccagaatatcaactctcagggctacacctccgcaacgctggcgcgacgtagtgttgatatcttccaaaactacgttgcgattgccctgatgtttggcgtccaggctgtagacctgaggacttataaaaagactggccattacgatgcgcgtgcttgcctctctccggctaccgaacgcctgtattccgccgtgcgtcacgtagttggtcagaaacctacttcagatcgcccatacatctggaacgataacgagcagggtctggatgaacacatcgctcgcatctccgctgacattgccgctggcggagtaattgttcaagctgtacaggatatcctgccgtgcctgcactaaccggcttatcggtcagtttcacctgatttacgtaaaaacccgcttcggcgggtttttgcttttggaggggcagaaagatgaatgactgtccacgacgctatacccaaaagaaa

SEQ ID NO: 335 - DNA, 5122 bp, synthetic construct
  source 1..5122: mol_type = other DNA
aggctaggtggaggctcagtgatgataagtctgcgatggtggatgcatgtgtcatggtcatagctgtttcctgtgtgaaattgttatccgctcagagggcacaatcctattccgcgctatccgacaatctccaagacattaggtggagttcagttcggcgagcggaaatggcttacgaacggggcggagatttcctggaagatgccaggaagatacttaacagggaagtgagagggccgcggcaaagccgtttttccataggctccgcccccctgacaagcatcacgaaatctgacgctcaaatcagtggtggcgaaacccgacaggactataaagataccaggcgtttccccctggcggctccctcgtgcgctctcctgttcctgcctttcggtttaccggtgtcattccgctgttatggccgcgtttgtctcattccacgcctgacactcagttccgggtaggcagttcgctccaagctggactgtatgcacgaaccccccgttcagtccgaccgctgcgccttatccggtaactatcgtcttgagtccaacccggaaagacatgcaaaagcaccactggcagcagccactggtaattgatttagaggagttagtcttgaagtcatgcgccggttaaggctaaactgaaaggacaagttttggtgactgcgctcctccaagccagttacctcggttcaaagagttggtagctcagagaaccttcgaaaaaccgccctgcaaggcggttttttcgttttcagagcaagagattacgcgcagaccaaaacgatctcaagaagatcatcttattaagtctgacgctctattcaacaaagccgccgtccatgggtagggggcttcaaatcgtcctcgtgataccaattcggagcctgcttttttgtacaaacttgttgataatggcaattcaaggatcttcacctagatccttttaaattaaaaatgaagttttaaatcaatctaaagtatatatgagtaaacttggtctgacagttaccaatgcttaatcagtgaggcacctatctcagcgatctgtctatttcgttcatccatagttgcctgactccccgtcgtgtagataactacgatacgggagggcttaccatctggccccagtgctgcaatgataccgcgagagccacgctcaccggctccagatttatcagcaataaaccagccagccggaagggccgagcgcagaagtggtcctgcaactttatccgcctccatccagtctattaattgttgccgggaagctagagtaagtagttcgccagttaatagtttgcgcaacgttgttgccattgctacaggcatcgtggtgtcacgctcgtcgtttggtatggcttcattcagctccggttcccaacgatcaaggcgagttacatgatcccccatgttgtgcaaaaaagcggttagctccttcggtcctccgatcgttgtcagaagtaagttggccgcagtgttatcactcatggttatggcagcactgcataattctcttactgtcatgccatccgtaagatgcttttctgtgactggtgagtactcaaccaagtcattctgagaatagtgtatgcggcgaccgagttgctcttgcccggcgtcaatacgggataataccgcgccacatagcagaactttaaaagtgctcatcattggaaaacgttcttcggggcgaaaactctcaaggatcttaccgctgttgagatccagttcgatgtaacccactcgtgcacccaactgatcttcagcatcttttactttcaccagcgtttctgggtgagcaaaaacaggaaggcaaaatgccgcaaaaaagggaataagggcgacacggaaatgttgaatactcatactcttcctttttcaatattattgaagcatttatcagggttattgtctcatgagcggatacatatttgaatgtatttagaaaaataaacaaataggggttccgcgcacatttccccgaaaagtgccagatacctgaaacaaaacccatcgtacggccaaggaagtctccaataactgtgatccaccacaagcgccagggttttcccagtcacgacgttgtaaaacgacggccagtcatgcataatccgcacgcatctggaataaggaagtgccattccgcctgacctttgcctatgaggaccaaaacgaaaaaacaccctttcgggtgtcttttctggaatttggtaccgagaggctccatgattcagtatgacttgcctttggtcgaaaaaaaaagcccgcactgtcaggtgcgggcttttttctgtgtttccttattaggacccactttcacatttaagttgtttttctaatccgcatatgatcaattcaaggccgaataagaaggctggctctgcaccttggtgatcaaataattcgatagcttgtcgtaataatggcggcatactatcagtagtaggtgtttccctttcttctttagcgacttgatgctcttgatcttccaatacgcaacctaaagtaaaatgccccacagcgctgagtgcatataatgcattctctagtgaaaaaccttgttggcataaaaaggctaattgattttcgagagtttcatactgtttttctgtaggccgtgtacctaaatgtacttttgctccatcgcgatgacttagtaaagcacatctaaaacttttagcgttattacgtaaaaaatcttgccagctttccccttctaaagggcaaaagtgagtatggtgcctatctaacatctcaatggctaaggcgtcgagcaaagcccgcttattttttacatgccaatacaatgtaggctgctctacacctagcttctgggcgagtttacgggttgttaaaccttcgattccgacctcattaagcagctctaatgcgctgttaatcactttacttttatctaatctggacatattcaccaccctgaattgactctcttccgggcgctatcatgccataccgcgaaaggttttgcgccattcgatggcgcgccgccattgcttgtgcaatgtacatcagagattttgagacacaaccaattattgaaggcctccctaacggggggcctttttttgtttctggtcccccgcttaacgatcgttggctgttttcagcaggacgcactgacctccctatcagtgatagagattgacatccctatcagtgatagagatactgagcacagctgtcaccggatgtgctttccggtctgatgagtccgtgaggacgaaacagcctctacaaataattttgtttaaatcacacgggtaaggaggtatttaaatgaaaacactgtcccaagcacagtcgaagacgagtagccagcagttttctttcaccggtaattctagcgctaacgtgattatcggcaaccagaaactaactatcaacgacgtcgcccgcgttgctcggaacgggaccttagtaagcctgactaacaacactgatatacttcaaggcattcaggcgtcctgtgattatatcaataacgcagttgagtctggtgaaccaatttacggtgtgacctcaggcttcggcggtatggcgaacgttgctatcagccgtgaacaggcctccgaactgcaatcgaatgccgtatggcacgtcaaaactggtgctgggaacaaactccctttggcggacgtacgtgcagcaatgctgctgcgcgccaactcgcatatgcgtggcgcgtccggtatccgtctggagctgatcaaacgtatggaaatcttcttgaacgctggtgttactccgtacgtttatgaatttggatctatcggcgcttctggagatctggtcccgctgagctacattacgggttccctgattggccttgacccgagcttcaaggtggatttcaacggcaaagaaatggacgccccgaccgcgttacgccagttaaatctgtctcccctgacacttctgcctaaagaaggtctagctatgctcaatgggacctcagtcatgactggcatcgcagctaactgcgtatacgacacccagatcctgactgcgattgcaatgggtgttcacgctctggatatccaggccctgaacggcaccaaccagtctttccacccgtttatccataactctaagccgcacccaggtcagctgtgggcggctgatcagatgatatcattgctggctaactcgcaactggtacgggacgagctggacggcaaacatgattaccgcgaccacgagctgatccaggatcgttatagcctgcgttgccttccgcagtacctgggtccgattgtggacggtatctcacagatagcaaaacaaatcgaaattgaaattaactccgttactgataaccctctgattgacgtcgataaccaggcgtcgtaccacggcggaaatttcctgggtcagtatgttggcatgggtatggaccaccttcgctactatatcggcctgctggcgaaacacctggatgtgcagattgcgctgctagctagtcccgaatttagcaacggactgccgccatctttattgggcaaccgtgaacgtaaggttaacatgggtctgaaaggtttacaaatctgtggcaattccatcatgccgctgctgacgttctacggcaatagcatcgccgaccgctttccgacccatgcagagcaattcaaccagaatatcaactctcagggctacacctccgcaacgctggcgcgacgtagtgttgatatcttccaaaactacgttgcgattgccctgatgtttggcgtccaggctgtagacctgaggacttataaaaagactggccattacgatgcgcgtgcttgcctctctccggctaccgaacgcctgtattccgccgtgcgtcacgtagttggtcagaaacctacttcagatcgcccatacatctggaacgataacgagcagggtctggatgaacacatcgctcgcatctccgctgacattgccgctggcggagtaattgttcaagctgtacaggatatcctgccgtgcctgcactaaccggcttatcggtcagtttcacctgatttacgtaaaaacccgcttcggcgggtttttgcttttggaggggcagaaagatgaatgactgtccacgacgctatacccaaaagaaa

SEQ ID NO: 336 - DNA, 5122 bp, synthetic construct
  source 1..5122: mol_type = other DNA
aggctaggtggaggctcagtgatgataagtctgcgatggtggatgcatgtgtcatggtcatagctgtttcctgtgtgaaattgttatccgctcagagggcacaatcctattccgcgctatccgacaatctccaagacattaggtggagttcagttcggcgagcggaaatggcttacgaacggggcggagatttcctggaagatgccaggaagatacttaacagggaagtgagagggccgcggcaaagccgtttttccataggctccgcccccctgacaagcatcacgaaatctgacgctcaaatcagtggtggcgaaacccgacaggactataaagataccaggcgtttccccctggcggctccctcgtgcgctctcctgttcctgcctttcggtttaccggtgtcattccgctgttatggccgcgtttgtctcattccacgcctgacactcagttccgggtaggcagttcgctccaagctggactgtatgcacgaaccccccgttcagtccgaccgctgcgccttatccggtaactatcgtcttgagtccaacccggaaagacatgcaaaagcaccactggcagcagccactggtaattgatttagaggagttagtcttgaagtcatgcgccggttaaggctaaactgaaaggacaagttttggtgactgcgctcctccaagccagttacctcggttcaaagagttggtagctcagagaaccttcgaaaaaccgccctgcaaggcggttttttcgttttcagagcaagagattacgcgcagaccaaaacgatctcaagaagatcatcttattaagtctgacgctctattcaacaaagccgccgtccatgggtagggggcttcaaatcgtcctcgtgataccaattcggagcctgcttttttgtacaaacttgttgataatggcaattcaaggatcttcacctagatccttttaaattaaaaatgaagttttaaatcaatctaaagtatatatgagtaaacttggtctgacagttaccaatgcttaatcagtgaggcacctatctcagcgatctgtctatttcgttcatccatagttgcctgactccccgtcgtgtagataactacgatacgggagggcttaccatctggccccagtgctgcaatgataccgcgagagccacgctcaccggctccagatttatcagcaataaaccagccagccggaagggccgagcgcagaagtggtcctgcaactttatccgcctccatccagtctattaattgttgccgggaagctagagtaagtagttcgccagttaatagtttgcgcaacgttgttgccattgctacaggcatcgtggtgtcacgctcgtcgtttggtatggcttcattcagctccggttcccaacgatcaaggcgagttacatgatcccccatgttgtgcaaaaaagcggttagctccttcggtcctccgatcgttgtcagaagtaagttggccgcagtgttatcactcatggttatggcagcactgcataattctcttactgtcatgccatccgtaagatgcttttctgtgactggtgagtactcaaccaagtcattctgagaatagtgtatgcggcgaccgagttgctcttgcccggcgtcaatacgggataataccgcgccacatagcagaactttaaaagtgctcatcattggaaaacgttcttcggggcgaaaactctcaaggatcttaccgctgttgagatccagttcgatgtaacccactcgtgcacccaactgatcttcagcatcttttactttcaccagcgtttctgggtgagcaaaaacaggaaggcaaaatgccgcaaaaaagggaataagggcgacacggaaatgttgaatactcatactcttcctttttcaatattattgaagcatttatcagggttattgtctcatgagcggatacatatttgaatgtatttagaaaaataaacaaataggggttccgcgcacatttccccgaaaagtgccagatacctgaaacaaaacccatcgtacggccaaggaagtctccaataactgtgatccaccacaagcgccagggttttcccagtcacgacgttgtaaaacgacggccagtcatgcataatccgcacgcatctggaataaggaagtgccattccgcctgacctttgcctatgaggaccaaaacgaaaaaacaccctttcgggtgtcttttctggaatttggtaccgagaggctccatgattcagtatgacttgcctttggtcgaaaaaaaaagcccgcactgtcaggtgcgggcttttttctgtgtttccttattaggacccactttcacatttaagttgtttttctaatccgcatatgatcaattcaaggccgaataagaaggctggctctgcaccttggtgatcaaataattcgatagcttgtcgtaataatggcggcatactatcagtagtaggtgtttccctttcttctttagcgacttgatgctcttgatcttccaatacgcaacctaaagtaaaatgccccacagcgctgagtgcatataatgcattctctagtgaaaaaccttgttggcataaaaaggctaattgattttcgagagtttcatactgtttttctgtaggccgtgtacctaaatgtacttttgctccatcgcgatgacttagtaaagcacatctaaaacttttagcgttattacgtaaaaaatcttgccagctttccccttctaaagggcaaaagtgagtatggtgcctatctaacatctcaatggctaaggcgtcgagcaaagcccgcttattttttacatgccaatacaatgtaggctgctctacacctagcttctgggcgagtttacgggttgttaaaccttcgattccgacctcattaagcagctctaatgcgctgttaatcactttacttttatctaatctggacatattcaccaccctgaattgactctcttccgggcgctatcatgccataccgcgaaaggttttgcgccattcgatggcgcgccgccattgcttgtgcaatgtacatcagagattttgagacacaaccaattattgaaggcctccctaacggggggcctttttttgtttctggtcccccgcttaacgatcgttggctgttttcagcaggacgcactgacctccctatcagtgatagagattgacatccctatcagtgatagagatactgagcacagctgtcaccggatgtgctttccggtctgatgagtccgtgaggacgaaacagcctctacaaataattttgtttaaatcacacgggtaaggaggtatttaaatgaaaacactgtcccaagcacagtcgaagacgagtagccagcagttttctttcaccggtaattctagcgctaacgtgattatcggcaaccagaaactaactatcaacgacgtcgcccgcgttgctcggaacgggaccttagtaagcctgactaacaacactgatatacttcaaggcattcaggcgtcctgtgattatatcaataacgcagttgagtctggtgaaccaatttacggtgtgacctcaggcttcggcggtatggcgaacgttgctatcagccgtgaacaggcctccgaactgcaagagaatgcggtatggcacctgaaaactggtgctgggaacaaactccctttggcggacgtacgtgcagcaatgctgctgcgcgccaactcgcatatgcgtggcgcgtccggtatccgtctggagctgatcaaacgtatggaaatcttcttgaacgctggtgttactccgtacgtttatgaatttggatctatcggcgcttctggagatctggtcccgctgagctacattacgggttccctgattggccttgacccgagcttcaaggtggatttcaacggcaaagaaatggacgccccgaccgcgttacgccagttaaatctgtctcccctgacacttctgcctaaagaagccctagctatgattaatgggacctcagtcatgactggcatcgcagctaactgcgtatacgacacccagatcctgactgcgattgcaatgggtgttcacgctctggatatccaggccctgaacggcaccaaccagtctttccacccgtttatccataactctaagccgcacccaggtcagctgtgggcggctgatcagatgatatcattgctggctaactcgcaactggtacgggacgagctggacggcaaacatgattaccgcgaccacgagctgatccaggatcgttatagcctgcgttgccttccgcagtacctgggtccgattgtggacggtatctcacagatagcaaaacaaatcgaaattgaaattaactccgttactgataaccctctgattgacgtcgataaccaggcgtcgtaccacggcggaaatttcctgggtcagtatgttggcatgggtatggaccaccttcgctactatatcggcctgctggcgaaacacctggatgtgcagattgcgctgctagctagtcccgaatttagcaacggactgccgccatctttattgggcaaccgtgaacgtaaggttaacatgggtctgaaaggtttacaaatctgtggcaattccatcatgccgctgctgacgttctacggcaatagcatcgccgaccgctttccgacccatgcagagcaattcaaccagaatatcaactctcagggctacacctccgcaacgctggcgcgacgtagtgttgatatcttccaaaactacgttgcgattgccctgatgtttggcgtccaggctgtagacctgaggacttataaaaagactggccattacgatgcgcgtgcttgcctctctccggctaccgaacgcctgtattccgccgtgcgtcacgtagttggtcagaaacctacttcagatcgcccatacatctggaacgataacgagcagggtctggatgaacacatcgctcgcatctccgctgacattgccgctggcggagtaattgttcaagctgtacaggatatcctgccgtgcctgcactaaccggcttatcggtcagtttcacctgatttacgtaaaaacccgcttcggcgggtttttgcttttggaggggcagaaagatgaatgactgtccacgacgctatacccaaaagaaa

SEQ ID NO: 337 - DNA, 5122 bp, synthetic construct
  source 1..5122: mol_type = other DNA
aggctaggtggaggctcagtgatgataagtctgcgatggtggatgcatgtgtcatggtcatagctgtttcctgtgtgaaattgttatccgctcagagggcacaatcctattccgcgctatccgacaatctccaagacattaggtggagttcagttcggcgagcggaaatggcttacgaacggggcggagatttcctggaagatgccaggaagatacttaacagggaagtgagagggccgcggcaaagccgtttttccataggctccgcccccctgacaagcatcacgaaatctgacgctcaaatcagtggtggcgaaacccgacaggactataaagataccaggcgtttccccctggcggctccctcgtgcgctctcctgttcctgcctttcggtttaccggtgtcattccgctgttatggccgcgtttgtctcattccacgcctgacactcagttccgggtaggcagttcgctccaagctggactgtatgcacgaaccccccgttcagtccgaccgctgcgccttatccggtaactatcgtcttgagtccaacccggaaagacatgcaaaagcaccactggcagcagccactggtaattgatttagaggagttagtcttgaagtcatgcgccggttaaggctaaactgaaaggacaagttttggtgactgcgctcctccaagccagttacctcggttcaaagagttggtagctcagagaaccttcgaaaaaccgccctgcaaggcggttttttcgttttcagagcaagagattacgcgcagaccaaaacgatctcaagaagatcatcttattaagtctgacgctctattcaacaaagccgccgtccatgggtagggggcttcaaatcgtcctcgtgataccaattcggagcctgcttttttgtacaaacttgttgataatggcaattcaaggatcttcacctagatccttttaaattaaaaatgaagttttaaatcaatctaaagtatatatgagtaaacttggtctgacagttaccaatgcttaatcagtgaggcacctatctcagcgatctgtctatttcgttcatccatagttgcctgactccccgtcgtgtagataactacgatacgggagggcttaccatctggccccagtgctgcaatgataccgcgagagccacgctcaccggctccagatttatcagcaataaaccagccagccggaagggccgagcgcagaagtggtcctgcaactttatccgcctccatccagtctattaattgttgccgggaagctagagtaagtagttcgccagttaatagtttgcgcaacgttgttgccattgctacaggcatcgtggtgtcacgctcgtcgtttggtatggcttcattcagctccggttcccaacgatcaaggcgagttacatgatcccccatgttgtgcaaaaaagcggttagctccttcggtcctccgatcgttgtcagaagtaagttggccgcagtgttatcactcatggttatggcagcactgcataattctcttactgtcatgccatccgtaagatgcttttctgtgactggtgagtactcaaccaagtcattctgagaatagtgtatgcggcgaccgagttgctcttgcccggcgtcaatacgggataataccgcgccacatagcagaactttaaaagtgctcatcattggaaaacgttcttcggggcgaaaactctcaaggatcttaccgctgttgagatccagttcgatgtaacccactcgtgcacccaactgatcttcagcatcttttactttcaccagcgtttctgggtgagcaaaaacaggaaggcaaaatgccgcaaaaaagggaataagggcgacacggaaatgttgaatactcatactcttcctttttcaatattattgaagcatttatcagggttattgtctcatgagcggatacatatttgaatgtatttagaaaaataaacaaataggggttccgcgcacatttccccgaaaagtgccagatacctgaaacaaaacccatcgtacggccaaggaagtctccaataactgtgatccaccacaagcgccagggttttcccagtcacgacgttgtaaaacgacggccagtcatgcataatccgcacgcatctggaataaggaagtgccattccgcctgacctttgcctatgaggaccaaaacgaaaaaacaccctttcgggtgtcttttctggaatttggtaccgagaggctccatgattcagtatgacttgcctttggtcgaaaaaaaaagcccgcactgtcaggtgcgggcttttttctgtgtttccttattaggacccactttcacatttaagttgtttttctaatccgcatatgatcaattcaaggccgaataagaaggctggctctgcaccttggtgatcaaataattcgatagcttgtcgtaataatggcggcatactatcagtagtaggtgtttccctttcttctttagcgacttgatgctcttgatcttccaatacgcaacctaaagtaaaatgccccacagcgctgagtgcatataatgcattctctagtgaaaaaccttgttggcataaaaaggctaattgattttcgagagtttcatactgtttttctgtaggccgtgtacctaaatgtacttttgctccatcgcgatgacttagtaaagcacatctaaaacttttagcgttattacgtaaaaaatcttgccagctttccccttctaaagggcaaaagtgagtatggtgcctatctaacatctcaatggctaaggcgtcgagcaaagcccgcttattttttacatgccaatacaatgtaggctgctctacacctagcttctgggcgagtttacgggttgttaaaccttcgattccgacctcattaagcagctctaatgcgctgttaatcactttacttttatctaatctggacatattcaccaccctgaattgactctcttccgggcgctatcatgccataccgcgaaaggttttgcgccattcgatggcgcgccgccattgcttgtgcaatgtacatcagagattttgagacacaaccaattattgaaggcctccctaacggggggcctttttttgtttctggtcccccgcttaacgatcgttggctgttttcagcaggacgcactgacctccctatcagtgatagagattgacatccctatcagtgatagagatactgagcacagctgtcaccggatgtgctttccggtctgatgagtccgtgaggacgaaacagcctctacaaataattttgtttaaatcacacgggtaaggaggtatttaaatgaaaacactgtcccaagcacagtcgaagacgagtagccagcagttttctttcaccggtaattctagcgctaacgtgattatcggcaaccagaaactaactatcaacgacgtcgcccgcgttgctcggaacgggaccttagtaagcctgactaacaacactgatatacttcaaggcattcaggcgtcctgtgattatatcaataacgcagttgagtctggtgaaccaatttacggtgtgacctcaggcttcggcggtatggcgaacgttgctatcagccgtgaacaggcctccgaactgcaagagaatgtagtatggtttatgaaaactggtgctgggaacaaactccctttggcggacgtacgtgcagcaatgctgctgcgcgccaactcgcatatgcgtggcgcgtccggtatccgtctggagctgatcaaacgtatggaaatcttcttgaacgctggtgttactccgtacgtttatgaatttggatctatcggcgcttctggagatctggtcccgctgagctacattacgggttccctgattggccttgacccgagcttcaaggtggatttcaacggcaaagaaatggacgccccgaccgcgttacgccagttaaatctgtctcccctgacacttctgcctaaagaaggtctagctatgctcaatgggacctcagtcatgactggcatcgcagctaactgcgtatacgacacccagatcctgactgcgattgcaatgggtgttcacgctctggatatccaggccctgaacggcaccaaccagtctttccacccgtttatccataactctaagccgcacccaggtcagctgtgggcggctgatcagatgatatcattgctggctaactcgcaactggtacgggacgagctggacggcaaacatgattaccgcgaccacgagctgatccaggatcgttatagcctgcgttgccttccgcagtacctgggtccgattgtggacggtatctcacagatagcaaaacaaatcgaaattgaaattaactccgttactgataaccctctgattgacgtcgataaccaggcgtcgtaccacggcggaaatttcctgggtcagtatgttggcatgggtatggaccaccttcgctactatatcggcctgctggcgaaacacctggatgtgcagattgcgctgctagctagtcccgaatttagcaacggactgccgccatctttattgggcaaccgtgaacgtaaggttaacatgggtctgaaaggtttacaaatctgtggcaattccatcatgccgctgctgacgttctacggcaatagcatcgccgaccgctttccgacccatgcagagcaattcaaccagaatatcaactctcagggctacacctccgcaacgctggcgcgacgtagtgttgatatcttccaaaactacgttgcgattgccctgatgtttggcgtccaggctgtagacctgaggacttataaaaagactggccattacgatgcgcgtgcttgcctctctccggctaccgaacgcctgtattccgccgtgcgtcacgtagttggtcagaaacctacttcagatcgcccatacatctggaacgataacgagcagggtctggatgaacacatcgctcgcatctccgctgacattgccgctggcggagtaattgttcaagctgtacaggatatcctgccgtgcctgcactaaccggcttatcggtcagtttcacctgatttacgtaaaaacccgcttcggcgggtttttgcttttggaggggcagaaagatgaatgactgtccacgacgctatacccaaaagaaa

SEQ ID NO: 338 - DNA, 5122 bp, synthetic construct
  source 1..5122: mol_type = other DNA
aggctaggtggaggctcagtgatgataagtctgcgatggtggatgcatgtgtcatggtcatagctgtttcctgtgtgaaattgttatccgctcagagggcacaatcctattccgcgctatccgacaatctccaagacattaggtggagttcagttcggcgagcggaaatggcttacgaacggggcggagatttcctggaagatgccaggaagatacttaacagggaagtgagagggccgcggcaaagccgtttttccataggctccgcccccctgacaagcatcacgaaatctgacgctcaaatcagtggtggcgaaacccgacaggactataaagataccaggcgtttccccctggcggctccctcgtgcgctctcctgttcctgcctttcggtttaccggtgtcattccgctgttatggccgcgtttgtctcattccacgcctgacactcagttccgggtaggcagttcgctccaagctggactgtatgcacgaaccccccgttcagtccgaccgctgcgccttatccggtaactatcgtcttgagtccaacccggaaagacatgcaaaagcaccactggcagcagccactggtaattgatttagaggagttagtcttgaagtcatgcgccggttaaggctaaactgaaaggacaagttttggtgactgcgctcctccaagccagttacctcggttcaaagagttggtagctcagagaaccttcgaaaaaccgccctgcaaggcggttttttcgttttcagagcaagagattacgcgcagaccaaaacgatctcaagaagatcatcttattaagtctgacgctctattcaacaaagccgccgtccatgggtagggggcttcaaatcgtcctcgtgataccaattcggagcctgcttttttgtacaaacttgttgataatggcaattcaaggatcttcacctagatccttttaaattaaaaatgaagttttaaatcaatctaaagtatatatgagtaaacttggtctgacagttaccaatgcttaatcagtgaggcacctatctcagcgatctgtctatttcgttcatccatagttgcctgactccccgtcgtgtagataactacgatacgggagggcttaccatctggccccagtgctgcaatgataccgcgagagccacgctcaccggctccagatttatcagcaataaaccagccagccggaagggccgagcgcagaagtggtcctgcaactttatccgcctccatccagtctattaattgttgccgggaagctagagtaagtagttcgccagttaatagtttgcgcaacgttgttgccattgctacaggcatcgtggtgtcacgctcgtcgtttggtatggcttcattcagctccggttcccaacgatcaaggcgagttacatgatcccccatgttgtgcaaaaaagcggttagctccttcggtcctccgatcgttgtcagaagtaagttggccgcagtgttatcactcatggttatggcagcactgcataattctcttactgtcatgccatccgtaagatgcttttctgtgactggtgagtactcaaccaagtcattctgagaatagtgtatgcggcgaccgagttgctcttgcccggcgtcaatacgggataataccgcgccacatagcagaactttaaaagtgctcatcattggaaaacgttcttcggggcgaaaactctcaaggatcttaccgctgttgagatccagttcgatgtaacccactcgtgcacccaactgatcttcagcatcttttactttcaccagcgtttctgggtgagcaaaaacaggaaggcaaaatgccgcaaaaaagggaataagggcgacacggaaatgttgaatactcatactcttcctttttcaatattattgaagcatttatcagggttattgtctcatgagcggatacatatttgaatgtatttagaaaaataaacaaataggggttccgcgcacatttccccgaaaagtgccagatacctgaaacaaaacccatcgtacggccaaggaagtctccaataactgtgatccaccacaagcgccagggttttcccagtcacgacgttgtaaaacgacggccagtcatgcataatccgcacgcatctggaataaggaagtgccattccgcctgacctttgcctatgaggaccaaaacgaaaaaacaccctttcgggtgtcttttctggaatttggtaccgagaggctccatgattcagtatgacttgcctttggtcgaaaaaaaaagcccgcactgtcaggtgcgggcttttttctgtgtttccttattaggacccactttcacatttaagttgtttttctaatccgcatatgatcaattcaaggccgaataagaaggctggctctgcaccttggtgatcaaataattcgatagcttgtcgtaataatggcggcatactatcagtagtaggtgtttccctttcttctttagcgacttgatgctcttgatcttccaatacgcaacctaaagtaaaatgccccacagcgctgagtgcatataatgcattctctagtgaaaaaccttgttggcataaaaaggctaattgattttcgagagtttcatactgtttttctgtaggccgtgtacctaaatgtacttttgctccatcgcgatgacttagtaaagcacatctaaaacttttagcgttattacgtaaaaaatcttgccagctttccccttctaaagggcaaaagtgagtatggtgcctatctaacatctcaatggctaaggcgtcgagcaaagcccgcttattttttacatgccaatacaatgtaggctgctctacacctagcttctgggcgagtttacgggttgttaaaccttcgattccgacctcattaagcagctctaatgcgctgttaatcactttacttttatctaatctggacatattcaccaccctgaattgactctcttccgggcgctatcatgccataccgcgaaaggttttgcgccattcgatggcgcgccgccattgcttgtgcaatgtacatcagagattttgagacacaaccaattattgaaggcctccctaacggggggcctttttttgtttctggtcccccgcttaacgatcgttggctgttttcagcaggacgcactgacctccctatcagtgatagagattgacatccctatcagtgatagagatactgagcacagctgtcaccggatgtgctttccggtctgatgagtccgtgaggacgaaacagcctctacaaataattttgtttaaatcacacgggtaaggaggtatttaaatgaaaacactgtcccaagcacagtcgaagacgagtagccagcagttttctttcaccggtaattctagcgctaacgtgattatcggcaaccagaaactaactatcaacgacgtcgcccgcgttgctcggaacgggaccttagtaagcctgactaacaacactgatatacttcaaggcattcaggcgtcctgtgattatatcaataacgcagttgagtctggtgaaccaatttacggtgtgacctcaggcttcggcggtatggcgaacgttgctatcagccgtgaacaggcctccgaactgcaagagaatgcggtatggcatctgaaaactggtgctgggaacaaactccctttggcggacgtacgtgcagcaatgctgctgcgcgccaactcgcatatgcgtggcgcgtccggtatccgtctggagctgatcaaacgtatggaaatcttcttgaacgctggtgttactccgtacgtttatgaatttggatctatcggcgcttctggagatctggtcccgctgagctacattacgggttccctgattggccttgacccgagcttcaaggtggatttcaacggcaaagaaatggacgccccgaccgcgttacgccagttaaatctgtctcccctgacacttctgcctaaagaaggtctagctatggtgaatgggacctcagtcatgactggcatcgcagctaactgcgtatacgacacccagatcctgactgcgattgcaatgggtgttcacgctctggatatccaggccctgaacggcaccaaccagtctttccacccgtttatccataactctaagccgcacccaggtcagctgtgggcggctgatcagatgatatcattgctggctaactcgcaactggtacgggacgagctggacggcaaacatgattaccgcgaccacgagctgatccaggatcgttatagcctgcgttgccttccgcagtacctgggtccgattgtggacggtatctcacagatagcaaaacaaatcgaaattgaaattaactccgttactgataaccctctgattgacgtcgataaccaggcgtcgtaccacggcggaaatttcctgggtcagtatgttggcatgggtatggaccaccttcgctactatatcggcctgctggcgaaacacctggatgtgcagattgcgctgctagctagtcccgaatttagcaacggactgccgccatctttattgggcaaccgtgaacgtaaggttaacatgggtctgaaaggtttacaaatctgtggcaattccatcatgccgctgctgacgttctacggcaatagcatcgccgaccgctttccgacccatgcagagcaattcaaccagaatatcaactctcagggctacacctccgcaacgctggcgcgacgtagtgttgatatcttccaaaactacgttgcgattgccctgatgtttggcgtccaggctgtagacctgaggacttataaaaagactggccattacgatgcgcgtgcttgcctctctccggctaccgaacgcctgtattccgccgtgcgtcacgtagttggtcagaaacctacttcagatcgcccatacatctggaacgataacgagcagggtctggatgaacacatcgctcgcatctccgctgacattgccgctggcggagtaattgttcaagctgtacaggatatcctgccgtgcctgcactaaccggcttatcggtcagtttcacctgatttacgtaaaaacccgcttcggcgggtttttgcttttggaggggcagaaagatgaatgactgtccacgacgctatacccaaaagaaa

SEQ ID NO: 339 - DNA, 5122 bp, synthetic construct
  source 1..5122: mol_type = other DNA
aggctaggtggaggctcagtgatgataagtctgcgatggtggatgcatgtgtcatggtcatagctgtttcctgtgtgaaattgttatccgctcagagggcacaatcctattccgcgctatccgacaatctccaagacattaggtggagttcagttcggcgagcggaaatggcttacgaacggggcggagatttcctggaagatgccaggaagatacttaacagggaagtgagagggccgcggcaaagccgtttttccataggctccgcccccctgacaagcatcacgaaatctgacgctcaaatcagtggtggcgaaacccgacaggactataaagataccaggcgtttccccctggcggctccctcgtgcgctctcctgttcctgcctttcggtttaccggtgtcattccgctgttatggccgcgtttgtctcattccacgcctgacactcagttccgggtaggcagttcgctccaagctggactgtatgcacgaaccccccgttcagtccgaccgctgcgccttatccggtaactatcgtcttgagtccaacccggaaagacatgcaaaagcaccactggcagcagccactggtaattgatttagaggagttagtcttgaagtcatgcgccggttaaggctaaactgaaaggacaagttttggtgactgcgctcctccaagccagttacctcggttcaaagagttggtagctcagagaaccttcgaaaaaccgccctgcaaggcggttttttcgttttcagagcaagagattacgcgcagaccaaaacgatctcaagaagatcatcttattaagtctgacgctctattcaacaaagccgccgtccatgggtagggggcttcaaatcgtcctcgtgataccaattcggagcctgcttttttgtacaaacttgttgataatggcaattcaaggatcttcacctagatccttttaaattaaaaatgaagttttaaatcaatctaaagtatatatgagtaaacttggtctgacagttaccaatgcttaatcagtgaggcacctatctcagcgatctgtctatttcgttcatccatagttgcctgactccccgtcgtgtagataactacgatacgggagggcttaccatctggccccagtgctgcaatgataccgcgagagccacgctcaccggctccagatttatcagcaataaaccagccagccggaagggccgagcgcagaagtggtcctgcaactttatccgcctccatccagtctattaattgttgccgggaagctagagtaagtagttcgccagttaatagtttgcgcaacgttgttgccattgctacaggcatcgtggtgtcacgctcgtcgtttggtatggcttcattcagctccggttcccaacgatcaaggcgagttacatgatcccccatgttgtgcaaaaaagcggttagctccttcggtcctccgatcgttgtcagaagtaagttggccgcagtgttatcactcatggttatggcagcactgcataattctcttactgtcatgccatccgtaagatgcttttctgtgactggtgagtactcaaccaagtcattctgagaatagtgtatgcggcgaccgagttgctcttgcccggcgtcaatacgggataataccgcgccacatagcagaactttaaaagtgctcatcattggaaaacgttcttcggggcgaaaactctcaaggatcttaccgctgttgagatccagttcgatgtaacccactcgtgcacccaactgatcttcagcatcttttactttcaccagcgtttctgggtgagcaaaaacaggaaggcaaaatgccgcaaaaaagggaataagggcgacacggaaatgttgaatactcatactcttcctttttcaatattattgaagcatttatcagggttattgtctcatgagcggatacatatttgaatgtatttagaaaaataaacaaataggggttccgcgcacatttccccgaaaagtgccagatacctgaaacaaaacccatcgtacggccaaggaagtctccaataactgtgatccaccacaagcgccagggttttcccagtcacgacgttgtaaaacgacggccagtcatgcataatccgcacgcatctggaataaggaagtgccattccgcctgacctttgcctatgaggaccaaaacgaaaaaacaccctttcgggtgtcttttctggaatttggtaccgagaggctccatgattcagtatgacttgcctttggtcgaaaaaaaaagcccgcactgtcaggtgcgggcttttttctgtgtttccttattaggacccactttcacatttaagttgtttttctaatccgcatatgatcaattcaaggccgaataagaaggctggctctgcaccttggtgatcaaataattcgatagcttgtcgtaataatggcggcatactatcagtagtaggtgtttccctttcttctttagcgacttgatgctcttgatcttccaatacgcaacctaaagtaaaatgccccacagcgctgagtgcatataatgcattctctagtgaaaaaccttgttggcataaaaaggctaattgattttcgagagtttcatactgtttttctgtaggccgtgtacctaaatgtacttttgctccatcgcgatgacttagtaaagcacatctaaaacttttagcgttattacgtaaaaaatcttgccagctttccccttctaaagggcaaaagtgagtatggtgcctatctaacatctcaatggctaaggcgtcgagcaaagcccgcttattttttacatgccaatacaatgtaggctgctctacacctagcttctgggcgagtttacgggttgttaaaccttcgattccgacctcattaagcagctctaatgcgctgttaatcactttacttttatctaatctggacatattcaccaccctgaattgactctcttccgggcgctatcatgccataccgcgaaaggttttgcgccattcgatggcgcgccgccattgcttgtgcaatgtacatcagagattttgagacacaaccaattattgaaggcctccctaacggggggcctttttttgtttctggtcccccgcttaacgatcgttggctgttttcagcaggacgcactgacctccctatcagtgatagagattgacatccctatcagtgatagagatactgagcacagctgtcaccggatgtgctttccggtctgatgagtccgtgaggacgaaacagcctctacaaataattttgtttaaatcacacgggtaaggaggtatttaaatgaaaacactgtcccaagcacagtcgaagacgagtagccagcagttttctttcaccggtaattctagcgctaacgtgattatcggcaaccagaaactaactatcaacgacgtcgcccgcgttgctcggaacgggaccttagtaagcctgactaacaacactgatatacttcaaggcattcaggcgtcctgtgattatatcaataacgcagttgagtctggtgaaccaatttacggtgtgacctcaggcttcggcggtatggcgaacgttgctatcagccgtgaacaggcctccgaactgcaacataatttggtatggtatcacaaaactggtgctgggaacaaactccctttggcggacgtacgtgcagcaatgctgctgcgcgccaactcgcatatgcgtggcgcgtccggtatccgtctggagctgatcaaacgtatggaaatcttcttgaacgctggtgttactccgtacgtttatgaatttggatctatcggcgcttctggagatctggtcccgctgagctacattacgggttccctgattggccttgacccgagcttcaaggtggatttcaacggcaaagaaatggacgccccgaccgcgttacgccagttaaatctgtctcccctgacacttctgcctaaagaagcgattgctatgattaatgggacctcagtcatgactggcatcgcagctaactgcgtatacgacacccagatcctgactgcgattgcaatgggtgttcacgctctggatatccaggccctgaacggcaccaaccagtctttccacccgtttatccataactctaagccgcacccaggtcagctgtgggcggctgatcagatgatatcattgctggctaactcgcaactggtacgggacgagctggacggcaaacatgattaccgcgaccacgagctgatccaggatcgttatagcctgcgttgccttccgcagtacctgggtccgattgtggacggtatctcacagatagcaaaacaaatcgaaattgaaattaactccgttactgataaccctctgattgacgtcgataaccaggcgtcgtaccacggcggaaatttcctgggtcagtatgttggcatgggtatggaccaccttcgctactatatcggcctgctggcgaaacacctggatgtgcagattgcgctgctagctagtcccgaatttagcaacggactgccgccatctttattgggcaaccgtgaacgtaaggttaacatgggtctgaaaggtttacaaatctgtggcaattccatcatgccgctgctgacgttctacggcaatagcatcgccgaccgctttccgacccatgcagagcaattcaaccagaatatcaactctcagggctacacctccgcaacgctggcgcgacgtagtgttgatatcttccaaaactacgttgcgattgccctgatgtttggcgtccaggctgtagacctgaggacttataaaaagactggccattacgatgcgcgtgcttgcctctctccggctaccgaacgcctgtattccgccgtgcgtcacgtagttggtcagaaacctacttcagatcgcccatacatctggaacgataacgagcagggtctggatgaacacatcgctcgcatctccgctgacattgccgctggcggagtaattgttcaagctgtacaggatatcctgccgtgcctgcactaaccggcttatcggtcagtttcacctgatttacgtaaaaacccgcttcggcgggtttttgcttttggaggggcagaaagatgaatgactgtccacgacgctatacccaaaagaaa

SEQ ID NO: 340 - DNA, 5122 bp, synthetic construct
  source 1..5122: mol_type = other DNA
aggctaggtggaggctcagtgatgataagtctgcgatggtggatgcatgtgtcatggtcatagctgtttcctgtgtgaaattgttatccgctcagagggcacaatcctattccgcgctatccgacaatctccaagacattaggtggagttcagttcggcgagcggaaatggcttacgaacggggcggagatttcctggaagatgccaggaagatacttaacagggaagtgagagggccgcggcaaagccgtttttccataggctccgcccccctgacaagcatcacgaaatctgacgctcaaatcagtggtggcgaaacccgacaggactataaagataccaggcgtttccccctggcggctccctcgtgcgctctcctgttcctgcctttcggtttaccggtgtcattccgctgttatggccgcgtttgtctcattccacgcctgacactcagttccgggtaggcagttcgctccaagctggactgtatgcacgaaccccccgttcagtccgaccgctgcgccttatccggtaactatcgtcttgagtccaacccggaaagacatgcaaaagcaccactggcagcagccactggtaattgatttagaggagttagtcttgaagtcatgcgccggttaaggctaaactgaaaggacaagttttggtgactgcgctcctccaagccagttacctcggttcaaagagttggtagctcagagaaccttcgaaaaaccgccctgcaaggcggttttttcgttttcagagcaagagattacgcgcagaccaaaacgatctcaagaagatcatcttattaagtctgacgctctattcaacaaagccgccgtccatgggtagggggcttcaaatcgtcctcgtgataccaattcggagcctgcttttttgtacaaacttgttgataatggcaattcaaggatcttcacctagatccttttaaattaaaaatgaagttttaaatcaatctaaagtatatatgagtaaacttggtctgacagttaccaatgcttaatcagtgaggcacctatctcagcgatctgtctatttcgttcatccatagttgcctgactccccgtcgtgtagataactacgatacgggagggcttaccatctggccccagtgctgcaatgataccgcgagagccacgctcaccggctccagatttatcagcaataaaccagccagccggaagggccgagcgcagaagtggtcctgcaactttatccgcctccatccagtctattaattgttgccgggaagctagagtaagtagttcgccagttaatagtttgcgcaacgttgttgccattgctacaggcatcgtggtgtcacgctcgtcgtttggtatggcttcattcagctccggttcccaacgatcaaggcgagttacatgatcccccatgttgtgcaaaaaagcggttagctccttcggtcctccgatcgttgtcagaagtaagttggccgcagtgttatcactcatggttatggcagcactgcataattctcttactgtcatgccatccgtaagatgcttttctgtgactggtgagtactcaaccaagtcattctgagaatagtgtatgcggcgaccgagttgctcttgcccggcgtcaatacgggataataccgcgccacatagcagaactttaaaagtgctcatcattggaaaacgttcttcggggcgaaaactctcaaggatcttaccgctgttgagatccagttcgatgtaacccactcgtgcacccaactgatcttcagcatcttttactttcaccagcgtttctgggtgagcaaaaacaggaaggcaaaatgccgcaaaaaagggaataagggcgacacggaaatgttgaatactcatactcttcctttttcaatattattgaagcatttatcagggttattgtctcatgagcggatacatatttgaatgtatttagaaaaataaacaaataggggttccgcgcacatttccccgaaaagtgccagatacctgaaacaaaacccatcgtacggccaaggaagtctccaataactgtgatccaccacaagcgccagggttttcccagtcacgacgttgtaaaacgacggccagtcatgcataatccgcacgcatctggaataaggaagtgccattccgcctgacctttgcctatgaggaccaaaacgaaaaaacaccctttcgggtgtcttttctggaatttggtaccgagaggctccatgattcagtatgacttgcctttggtcgaaaaaaaaagcccgcactgtcaggtgcgggcttttttctgtgtttccttattaggacccactttcacatttaagttgtttttctaatccgcatatgatcaattcaaggccgaataagaaggctggctctgcaccttggtgatcaaataattcgatagcttgtcgtaataatggcggcatactatcagtagtaggtgtttccctttcttctttagcgacttgatgctcttgatcttccaatacgcaacctaaagtaaaatgccccacagcgctgagtgcatataatgcattctctagtgaaaaaccttgttggcataaaaaggctaattgattttcgagagtttcatactgtttttctgtaggccgtgtacctaaatgtacttttgctccatcgcgatgacttagtaaagcacatctaaaacttttagcgttattacgtaaaaaatcttgccagctttccccttctaaagggcaaaagtgagtatggtgcctatctaacatctcaatggctaaggcgtcgagcaaagcccgcttattttttacatgccaatacaatgtaggctgctctacacctagcttctgggcgagtttacgggttgttaaaccttcgattccgacctcattaagcagctctaatgcgctgttaatcactttacttttatctaatctggacatattcaccaccctgaattgactctcttccgggcgctatcatgccataccgcgaaaggttttgcgccattcgatggcgcgccgccattgcttgtgcaatgtacatcagagattttgagacacaaccaattattgaaggcctccctaacggggggcctttttttgtttctggtcccccgcttaacgatcgttggctgttttcagcaggacgcactgacctccctatcagtgatagagattgacatccctatcagtgatagagatactgagcacagctgtcaccggatgtgctttccggtctgatgagtccgtgaggacgaaacagcctctacaaataattttgtttaaatcacacgggtaaggaggtatttaaatgaaaacactgtcccaagcacagtcgaagacgagtagccagcagttttctttcaccggtaattctagcgctaacgtgattatcggcaaccagaaactaactatcaacgacgtcgcccgcgttgctcggaacgggaccttagtaagcctgactaacaacactgatatacttcaaggcattcaggcgtcctgtgattatatcaataacgcagttgagtctggtgaaccaatttacggtgtgacctcaggcttcggcggtatggcgaacgttgctatcagccgtgaacaggcctccgaactgcaagagaatttggtatggagtgtgaaaactggtgctgggaacaaactccctttggcggacgtacgtgcagcaatgctgctgcgcgccaactcgcatatgcgtggcgcgtccggtatccgtctggagctgatcaaacgtatggaaatcttcttgaacgctggtgttactccgtacgtttatgaatttggatctatcggcgcttctggagatctggtcccgctgagctacattacgggttccctgattggccttgacccgagcttcaaggtggatttcaacggcaaagaaatggacgccccgaccgcgttacgccagttaaatctgtctcccctgacacttctgcctaaagaaggtctagctatgctcaatgggacctcagtcatgactggcatcgcagctaactgcgtatacgacacccagatcctgactgcgattgcaatgggtgttcacgctctggatatccaggccctgaacggcaccaaccagtctttccacccgtttatccataactctaagccgcacccaggtcagctgtgggcggctgatcagatgatatcattgctggctaactcgcaactggtacgggacgagctggacggcaaacatgattaccgcgaccacgagctgatccaggatcgttatagcctgcgttgccttccgcagtacctgggtccgattgtggacggtatctcacagatagcaaaacaaatcgaaattgaaattaactccgttactgataaccctctgattgacgtcgataaccaggcgtcgtaccacggcggaaatttcctgggtcagtatgttggcatgggtatggaccaccttcgctactatatcggcctgctggcgaaacacctggatgtgcagattgcgctgctagctagtcccgaatttagcaacggactgccgccatctttattgggcaaccgtgaacgtaaggttaacatgggtctgaaaggtttacaaatctgtggcaattccatcatgccgctgctgacgttctacggcaatagcatcgccgaccgctttccgacccatgcagagcaattcaaccagaatatcaactctcagggctacacctccgcaacgctggcgcgacgtagtgttgatatcttccaaaactacgttgcgattgccctgatgtttggcgtccaggctgtagacctgaggacttataaaaagactggccattacgatgcgcgtgcttgcctctctccggctaccgaacgcctgtattccgccgtgcgtcacgtagttggtcagaaacctacttcagatcgcccatacatctggaacgataacgagcagggtctggatgaacacatcgctcgcatctccgctgacattgccgctggcggagtaattgttcaagctgtacaggatatcctgccgtgcctgcactaaccggcttatcggtcagtttcacctgatttacgtaaaaacccgcttcggcgggtttttgcttttggaggggcagaaagatgaatgactgtccacgacgctatacccaaaagaaa

SEQ ID NO: 341 - DNA, 5122 bp, synthetic construct
  source 1..5122: mol_type = other DNA
aggctaggtggaggctcagtgatgataagtctgcgatggtggatgcatgtgtcatggtcatagctgtttcctgtgtgaaattgttatccgctcagagggcacaatcctattccgcgctatccgacaatctccaagacattaggtggagttcagttcggcgagcggaaatggcttacgaacggggcggagatttcctggaagatgccaggaagatacttaacagggaagtgagagggccgcggcaaagccgtttttccataggctccgcccccctgacaagcatcacgaaatctgacgctcaaatcagtggtggcgaaacccgacaggactataaagataccaggcgtttccccctggcggctccctcgtgcgctctcctgttcctgcctttcggtttaccggtgtcattccgctgttatggccgcgtttgtctcattccacgcctgacactcagttccgggtaggcagttcgctccaagctggactgtatgcacgaaccccccgttcagtccgaccgctgcgccttatccggtaactatcgtcttgagtccaacccggaaagacatgcaaaagcaccactggcagcagccactggtaattgatttagaggagttagtcttgaagtcatgcgccggttaaggctaaactgaaaggacaagttttggtgactgcgctcctccaagccagttacctcggttcaaagagttggtagctcagagaaccttcgaaaaaccgccctgcaaggcggttttttcgttttcagagcaagagattacgcgcagaccaaaacgatctcaagaagatcatcttattaagtctgacgctctattcaacaaagccgccgtccatgggtagggggcttcaaatcgtcctcgtgataccaattcggagcctgcttttttgtacaaacttgttgataatggcaattcaaggatcttcacctagatccttttaaattaaaaatgaagttttaaatcaatctaaagtatatatgagtaaacttggtctgacagttaccaatgcttaatcagtgaggcacctatctcagcgatctgtctatttcgttcatccatagttgcctgactccccgtcgtgtagataactacgatacgggagggcttaccatctggccccagtgctgcaatgataccgcgagagccacgctcaccggctccagatttatcagcaataaaccagccagccggaagggccgagcgcagaagtggtcctgcaactttatccgcctccatccagtctattaattgttgccgggaagctagagtaagtagttcgccagttaatagtttgcgcaacgttgttgccattgctacaggcatcgtggtgtcacgctcgtcgtttggtatggcttcattcagctccggttcccaacgatcaaggcgagttacatgatcccccatgttgtgcaaaaaagcggttagctccttcggtcctccgatcgttgtcagaagtaagttggccgcagtgttatcactcatggttatggcagcactgcataattctcttactgtcatgccatccgtaagatgcttttctgtgactggtgagtactcaaccaagtcattctgagaatagtgtatgcggcgaccgagttgctcttgcccggcgtcaatacgggataataccgcgccacatagcagaactttaaaagtgctcatcattggaaaacgttcttcggggcgaaaactctcaaggatcttaccgctgttgagatccagttcgatgtaacccactcgtgcacccaactgatcttcagcatcttttactttcaccagcgtttctgggtgagcaaaaacaggaaggcaaaatgccgcaaaaaagggaataagggcgacacggaaatgttgaatactcatactcttcctttttcaatattattgaagcatttatcagggttattgtctcatgagcggatacatatttgaatgtatttagaaaaataaacaaataggggttccgcgcacatttccccgaaaagtgccagatacctgaaacaaaacccatcgtacggccaaggaagtctccaataactgtgatccaccacaagcgccagggttttcccagtcacgacgttgtaaaacgacggccagtcatgcataatccgcacgcatctggaataaggaagtgccattccgcctgacctttgcctatgaggaccaaaacgaaaaaacaccctttcgggtgtcttttctggaatttggtaccgagaggctccatgattcagtatgacttgcctttggtcgaaaaaaaaagcccgcactgtcaggtgcgggcttttttctgtgtttccttattaggacccactttcacatttaagttgtttttctaatccgcatatgatcaattcaaggccgaataagaaggctggctctgcaccttggtgatcaaataattcgatagcttgtcgtaataatggcggcatactatcagtagtaggtgtttccctttcttctttagcgacttgatgctcttgatcttccaatacgcaacctaaagtaaaatgccccacagcgctgagtgcatataatgcattctctagtgaaaaaccttgttggcataaaaaggctaattgattttcgagagtttcatactgtttttctgtaggccgtgtacctaaatgtacttttgctccatcgcgatgacttagtaaagcacatctaaaacttttagcgttattacgtaaaaaatcttgccagctttccccttctaaagggcaaaagtgagtatggtgcctatctaacatctcaatggctaaggcgtcgagcaaagcccgcttattttttacatgccaatacaatgtaggctgctctacacctagcttctgggcgagtttacgggttgttaaaccttcgattccgacctcattaagcagctctaatgcgctgttaatcactttacttttatctaatctggacatattcaccaccctgaattgactctcttccgggcgctatcatgccataccgcgaaaggttttgcgccattcgatggcgcgccgccattgcttgtgcaatgtacatcagagattttgagacacaaccaattattgaaggcctccctaacggggggcctttttttgtttctggtcccccgcttaacgatcgttggctgttttcagcaggacgcactgacctccctatcagtgatagagattgacatccctatcagtgatagagatactgagcacagctgtcaccggatgtgctttccggtctgatgagtccgtgaggacgaaacagcctctacaaataattttgtttaaatcacacgggtaaggaggtatttaaatgaaaacactgtcccaagcacagtcgaagacgagtagccagcagttttctttcaccggtaattctagcgctaacgtgattatcggcaaccagaaactaactatcaacgacgtcgcccgcgttgctcggaacgggaccttagtaagcctgactaacaacactgatatacttcaaggcattcaggcgtcctgtgattatatcaataacgcagttgagtctggtgaaccaatttacggtgtgacctcaggcttcggcggtatggcgaacgttgctatcagccgtgaacaggcctccgaactgcaacacaatttggtatggtttatgaaaactggtgctgggaacaaactccctttggcggacgtacgtgcagcaatgctgctgcgcgccaactcgcatatgcgtggcgcgtccggtatccgtctggagctgatcaaacgtatggaaatcttcttgaacgctggtgttactccgtacgtttatgaatttggatctatcggcgcttctggagatctggtcccgctgagctacattacgggttccctgattggccttgacccgagcttcaaggtggatttcaacggcaaagaaatggacgccccgaccgcgttacgccagttaaatctgtctcccctgacacttctgcctaaagaaggtattgctatggtgaatgggacctcagtcatgactggcatcgcagctaactgcgtatacgacacccagatcctgactgcgattgcaatgggtgttcacgctctggatatccaggccctgaacggcaccaaccagtctttccacccgtttatccataactctaagccgcacccaggtcagctgtgggcggctgatcagatgatatcattgctggctaactcgcaactggtacgggacgagctggacggcaaacatgattaccgcgaccacgagctgatccaggatcgttatagcctgcgttgccttccgcagtacctgggtccgattgtggacggtatctcacagatagcaaaacaaatcgaaattgaaattaactccgttactgataaccctctgattgacgtcgataaccaggcgtcgtaccacggcggaaatttcctgggtcagtatgttggcatgggtatggaccaccttcgctactatatcggcctgctggcgaaacacctggatgtgcagattgcgctgctagctagtcccgaatttagcaacggactgccgccatctttattgggcaaccgtgaacgtaaggttaacatgggtctgaaaggtttacaaatctgtggcaattccatcatgccgctgctgacgttctacggcaatagcatcgccgaccgctttccgacccatgcagagcaattcaaccagaatatcaactctcagggctacacctccgcaacgctggcgcgacgtagtgttgatatcttccaaaactacgttgcgattgccctgatgtttggcgtccaggctgtagacctgaggacttataaaaagactggccattacgatgcgcgtgcttgcctctctccggctaccgaacgcctgtattccgccgtgcgtcacgtagttggtcagaaacctacttcagatcgcccatacatctggaacgataacgagcagggtctggatgaacacatcgctcgcatctccgctgacattgccgctggcggagtaattgttcaagctgtacaggatatcctgccgtgcctgcactaaccggcttatcggtcagtttcacctgatttacgtaaaaacccgcttcggcgggtttttgcttttggaggggcagaaagatgaatgactgtccacgacgctatacccaaaagaaa

SEQ ID NO: 342 - DNA, 5122 bp, synthetic construct
  source 1..5122: mol_type = other DNA
aggctaggtggaggctcagtgatgataagtctgcgatggtggatgcatgtgtcatggtcatagctgtttcctgtgtgaaattgttatccgctcagagggcacaatcctattccgcgctatccgacaatctccaagacattaggtggagttcagttcggcgagcggaaatggcttacgaacggggcggagatttcctggaagatgccaggaagatacttaacagggaagtgagagggccgcggcaaagccgtttttccataggctccgcccccctgacaagcatcacgaaatctgacgctcaaatcagtggtggcgaaacccgacaggactataaagataccaggcgtttccccctggcggctccctcgtgcgctctcctgttcctgcctttcggtttaccggtgtcattccgctgttatggccgcgtttgtctcattccacgcctgacactcagttccgggtaggcagttcgctccaagctggactgtatgcacgaaccccccgttcagtccgaccgctgcgccttatccggtaactatcgtcttgagtccaacccggaaagacatgcaaaagcaccactggcagcagccactggtaattgatttagaggagttagtcttgaagtcatgcgccggttaaggctaaactgaaaggacaagttttggtgactgcgctcctccaagccagttacctcggttcaaagagttggtagctcagagaaccttcgaaaaaccgccctgcaaggcggttttttcgttttcagagcaagagattacgcgcagaccaaaacgatctcaagaagatcatcttattaagtctgacgctctattcaacaaagccgccgtccatgggtagggggcttcaaatcgtcctcgtgataccaattcggagcctgcttttttgtacaaacttgttgataatggcaattcaaggatcttcacctagatccttttaaattaaaaatgaagttttaaatcaatctaaagtatatatgagtaaacttggtctgacagttaccaatgcttaatcagtgaggcacctatctcagcgatctgtctatttcgttcatccatagttgcctgactccccgtcgtgtagataactacgatacgggagggcttaccatctggccccagtgctgcaatgataccgcgagagccacgctcaccggctccagatttatcagcaataaaccagccagccggaagggccgagcgcagaagtggtcctgcaactttatccgcctccatccagtctattaattgttgccgggaagctagagtaagtagttcgccagttaatagtttgcgcaacgttgttgccattgctacaggcatcgtggtgtcacgctcgtcgtttggtatggcttcattcagctccggttcccaacgatcaaggcgagttacatgatcccccatgttgtgcaaaaaagcggttagctccttcggtcctccgatcgttgtcagaagtaagttggccgcagtgttatcactcatggttatggcagcactgcataattctcttactgtcatgccatccgtaagatgcttttctgtgactggtgagtactcaaccaagtcattctgagaatagtgtatgcggcgaccgagttgctcttgcccggcgtcaatacgggataataccgcgccacatagcagaactttaaaagtgctcatcattggaaaacgttcttcggggcgaaaactctcaaggatcttaccgctgttgagatccagttcgatgtaacccactcgtgcacccaactgatcttcagcatcttttactttcaccagcgtttctgggtgagcaaaaacaggaaggcaaaatgccgcaaaaaagggaataagggcgacacggaaatgttgaatactcatactcttcctttttcaatattattgaagcatttatcagggttattgtctcatgagcggatacatatttgaatgtatttagaaaaataaacaaataggggttccgcgcacatttccccgaaaagtgccagatacctgaaacaaaacccatcgtacggccaaggaagtctccaataactgtgatccaccacaagcgccagggttttcccagtcacgacgttgtaaaacgacggccagtcatgcataatccgcacgcatctggaataaggaagtgccattccgcctgacctttgcctatgaggaccaaaacgaaaaaacaccctttcgggtgtcttttctggaatttggtaccgagaggctccatgattcagtatgacttgcctttggtcgaaaaaaaaagcccgcactgtcaggtgcgggcttttttctgtgtttccttattaggacccactttcacatttaagttgtttttctaatccgcatatgatcaattcaaggccgaataagaaggctggctctgcaccttggtgatcaaataattcgatagcttgtcgtaataatggcggcatactatcagtagtaggtgtttccctttcttctttagcgacttgatgctcttgatcttccaatacgcaacctaaagtaaaatgccccacagcgctgagtgcatataatgcattctctagtgaaaaaccttgttggcataaaaaggctaattgattttcgagagtttcatactgtttttctgtaggccgtgtacctaaatgtacttttgctccatcgcgatgacttagtaaagcacatctaaaacttttagcgttattacgtaaaaaatcttgccagctttccccttctaaagggcaaaagtgagtatggtgcctatctaacatctcaatggctaaggcgtcgagcaaagcccgcttattttttacatgccaatacaatgtaggctgctctacacctagcttctgggcgagtttacgggttgttaaaccttcgattccgacctcattaagcagctctaatgcgctgttaatcactttacttttatctaatctggacatattcaccaccctgaattgactctcttccgggcgctatcatgccataccgcgaaaggttttgcgccattcgatggcgcgccgccattgcttgtgcaatgtacatcagagattttgagacacaaccaattattgaaggcctccctaacggggggcctttttttgtttctggtcccccgcttaacgatcgttggctgttttcagcaggacgcactgacctccctatcagtgatagagattgacatccctatcagtgatagagatactgagcacagctgtcaccggatgtgctttccggtctgatgagtccgtgaggacgaaacagcctctacaaataattttgtttaaatcacacgggtaaggaggtatttaaatgaaaacactgtcccaagcacagtcgaagacgagtagccagcagttttctttcaccggtaattctagcgctaacgtgattatcggcaaccagaaactaactatcaacgacgtcgcccgcgttgctcggaacgggaccttagtaagcctgactaacaacactgatatacttcaaggcattcaggcgtcctgtgattatatcaataacgcagttgagtctggtgaaccaatttacggtgtgacctcaggcttcggcggtatggcgaacgttgctatcagccgtgaacaggcctccgaactgcaaagtaatatggtatggtcgcataaaactggtgctgggaacaaactccctttggcggacgtacgtgcagcaatgctgctgcgcgccaactcgcatatgcgtggcgcgtccggtatccgtctggagctgatcaaacgtatggaaatcttcttgaacgctggtgttactccgtacgtttatgaatttggatctatcggcgcttctggagatctggtcccgctgagctacattacgggttccctgattggccttgacccgagcttcaaggtggatttcaacggcaaagaaatggacgccccgaccgcgttacgccagttaaatctgtctcccctgacacttctgcctaaagaagccattgctatggtcaatgggacctcagtcatgactggcatcgcagctaactgcgtatacgacacccagatcctgactgcgattgcaatgggtgttcacgctctggatatccaggccctgaacggcaccaaccagtctttccacccgtttatccataactctaagccgcacccaggtcagctgtgggcggctgatcagatgatatcattgctggctaactcgcaactggtacgggacgagctggacggcaaacatgattaccgcgaccacgagctgatccaggatcgttatagcctgcgttgccttccgcagtacctgggtccgattgtggacggtatctcacagatagcaaaacaaatcgaaattgaaattaactccgttactgataaccctctgattgacgtcgataaccaggcgtcgtaccacggcggaaatttcctgggtcagtatgttggcatgggtatggaccaccttcgctactatatcggcctgctggcgaaacacctggatgtgcagattgcgctgctagctagtcccgaatttagcaacggactgccgccatctttattgggcaaccgtgaacgtaaggttaacatgggtctgaaaggtttacaaatctgtggcaattccatcatgccgctgctgacgttctacggcaatagcatcgccgaccgctttccgacccatgcagagcaattcaaccagaatatcaactctcagggctacacctccgcaacgctggcgcgacgtagtgttgatatcttccaaaactacgttgcgattgccctgatgtttggcgtccaggctgtagacctgaggacttataaaaagactggccattacgatgcgcgtgcttgcctctctccggctaccgaacgcctgtattccgccgtgcgtcacgtagttggtcagaaacctacttcagatcgcccatacatctggaacgataacgagcagggtctggatgaacacatcgctcgcatctccgctgacattgccgctggcggagtaattgttcaagctgtacaggatatcctgccgtgcctgcactaaccggcttatcggtcagtttcacctgatttacgtaaaaacccgcttcggcgggtttttgcttttggaggggcagaaagatgaatgactgtccacgacgctatacccaaaagaaa

SEQ ID NO: 343 - DNA, 5122 bp, synthetic construct
  source 1..5122: mol_type = other DNA
aggctaggtggaggctcagtgatgataagtctgcgatggtggatgcatgtgtcatggtcatagctgtttcctgtgtgaaattgttatccgctcagagggcacaatcctattccgcgctatccgacaatctccaagacattaggtggagttcagttcggcgagcggaaatggcttacgaacggggcggagatttcctggaagatgccaggaagatacttaacagggaagtgagagggccgcggcaaagccgtttttccataggctccgcccccctgacaagcatcacgaaatctgacgctcaaatcagtggtggcgaaacccgacaggactataaagataccaggcgtttccccctggcggctccctcgtgcgctctcctgttcctgcctttcggtttaccggtgtcattccgctgttatggccgcgtttgtctcattccacgcctgacactcagttccgggtaggcagttcgctccaagctggactgtatgcacgaaccccccgttcagtccgaccgctgcgccttatccggtaactatcgtcttgagtccaacccggaaagacatgcaaaagcaccactggcagcagccactggtaattgatttagaggagttagtcttgaagtcatgcgccggttaaggctaaactgaaaggacaagttttggtgactgcgctcctccaagccagttacctcggttcaaagagttggtagctcagagaaccttcgaaaaaccgccctgcaaggcggttttttcgttttcagagcaagagattacgcgcagaccaaaacgatctcaagaagatcatcttattaagtctgacgctctattcaacaaagccgccgtccatgggtagggggcttcaaatcgtcctcgtgataccaattcggagcctgcttttttgtacaaacttgttgataatggcaattcaaggatcttcacctagatccttttaaattaaaaatgaagttttaaatcaatctaaagtatatatgagtaaacttggtctgacagttaccaatgcttaatcagtgaggcacctatctcagcgatctgtctatttcgttcatccatagttgcctgactccccgtcgtgtagataactacgatacgggagggcttaccatctggccccagtgctgcaatgataccgcgagagccacgctcaccggctccagatttatcagcaataaaccagccagccggaagggccgagcgcagaagtggtcctgcaactttatccgcctccatccagtctattaattgttgccgggaagctagagtaagtagttcgccagttaatagtttgcgcaacgttgttgccattgctacaggcatcgtggtgtcacgctcgtcgtttggtatggcttcattcagctccggttcccaacgatcaaggcgagttacatgatcccccatgttgtgcaaaaaagcggttagctccttcggtcctccgatcgttgtcagaagtaagttggccgcagtgttatcactcatggttatggcagcactgcataattctcttactgtcatgccatccgtaagatgcttttctgtgactggtgagtactcaaccaagtcattctgagaatagtgtatgcggcgaccgagttgctcttgcccggcgtcaatacgggataataccgcgccacatagcagaactttaaaagtgctcatcattggaaaacgttcttcggggcgaaaactctcaaggatcttaccgctgttgagatccagttcgatgtaacccactcgtgcacccaactgatcttcagcatcttttactttcaccagcgtttctgggtgagcaaaaacaggaaggcaaaatgccgcaaaaaagggaataagggcgacacggaaatgttgaatactcatactcttcctttttcaatattattgaagcatttatcagggttattgtctcatgagcggatacatatttgaatgtatttagaaaaataaacaaataggggttccgcgcacatttccccgaaaagtgccagatacctgaaacaaaacccatcgtacggccaaggaagtctccaataactgtgatccaccacaagcgccagggttttcccagtcacgacgttgtaaaacgacggccagtcatgcataatccgcacgcatctggaataaggaagtgccattccgcctgacctttgcctatgaggaccaaaacgaaaaaacaccctttcgggtgtcttttctggaatttggtaccgagaggctccatgattcagtatgacttgcctttggtcgaaaaaaaaagcccgcactgtcaggtgcgggcttttttctgtgtttccttattaggacccactttcacatttaagttgtttttctaatccgcatatgatcaattcaaggccgaataagaaggctggctctgcaccttggtgatcaaataattcgatagcttgtcgtaataatggcggcatactatcagtagtaggtgtttccctttcttctttagcgacttgatgctcttgatcttccaatacgcaacctaaagtaaaatgccccacagcgctgagtgcatataatgcattctctagtgaaaaaccttgttggcataaaaaggctaattgattttcgagagtttcatactgtttttctgtaggccgtgtacctaaatgtacttttgctccatcgcgatgacttagtaaagcacatctaaaacttttagcgttattacgtaaaaaatcttgccagctttccccttctaaagggcaaaagtgagtatggtgcctatctaacatctcaatggctaaggcgtcgagcaaagcccgcttattttttacatgccaatacaatgtaggctgctctacacctagcttctgggcgagtttacgggttgttaaaccttcgattccgacctcattaagcagctctaatgcgctgttaatcactttacttttatctaatctggacatattcaccaccctgaattgactctcttccgggcgctatcatgccataccgcgaaaggttttgcgccattcgatggcgcgccgccattgcttgtgcaatgtacatcagagattttgagacacaaccaattattgaaggcctccctaacggggggcctttttttgtttctggtcccccgcttaacgatcgttggctgttttcagcaggacgcactgacctccctatcagtgatagagattgacatccctatcagtgatagagatactgagcacagctgtcaccggatgtgctttccggtctgatgagtccgtgaggacgaaacagcctctacaaataattttgtttaaatcacacgggtaaggaggtatttaaatgaaaacactgtcccaagcacagtcgaagacgagtagccagcagttttctttcaccggtaattctagcgctaacgtgattatcggcaaccagaaactaactatcaacgacgtcgcccgcgttgctcggaacgggaccttagtaagcctgactaacaacactgatatacttcaaggcattcaggcgtcctgtgattatatcaataacgcagttgagtctggtgaaccaatttacggtgtgacctcaggcttcggcggtatggcgaacgttgctatcagccgtgaacaggcctccgaactgcaacacaatattgtatggcataccaaaactggtgctgggaacaaactccctttggcggacgtacgtgcagcaatgctgctgcgcgccaactcgcatatgcgtggcgcgtccggtatccgtctggagctgatcaaacgtatggaaatcttcttgaacgctggtgttactccgtacgtttatgaatttggatctatcggcgcttctggagatctggtcccgctgagctacattacgggttccctgattggccttgacccgagcttcaaggtggatttcaacggcaaagaaatggacgccccgaccgcgttacgccagttaaatctgtctcccctgacacttctgcctaaagaaggtctagctatgacgaatgggacctcagtcatgactggcatcgcagctaactgcgtatacgacacccagatcctgactgcgattgcaatgggtgttcacgctctggatatccaggccctgaacggcaccaaccagtctttccacccgtttatccataactctaagccgcacccaggtcagctgtgggcggctgatcagatgatatcattgctggctaactcgcaactggtacgggacgagctggacggcaaacatgattaccgcgaccacgagctgatccaggatcgttatagcctgcgttgccttccgcagtacctgggtccgattgtggacggtatctcacagatagcaaaacaaatcgaaattgaaattaactccgttactgataaccctctgattgacgtcgataaccaggcgtcgtaccacggcggaaatttcctgggtcagtatgttggcatgggtatggaccaccttcgctactatatcggcctgctggcgaaacacctggatgtgcagattgcgctgctagctagtcccgaatttagcaacggactgccgccatctttattgggcaaccgtgaacgtaaggttaacatgggtctgaaaggtttacaaatctgtggcaattccatcatgccgctgctgacgttctacggcaatagcatcgccgaccgctttccgacccatgcagagcaattcaaccagaatatcaactctcagggctacacctccgcaacgctggcgcgacgtagtgttgatatcttccaaaactacgttgcgattgccctgatgtttggcgtccaggctgtagacctgaggacttataaaaagactggccattacgatgcgcgtgcttgcctctctccggctaccgaacgcctgtattccgccgtgcgtcacgtagttggtcagaaacctacttcagatcgcccatacatctggaacgataacgagcagggtctggatgaacacatcgctcgcatctccgctgacattgccgctggcggagtaattgttcaagctgtacaggatatcctgccgtgcctgcactaaccggcttatcggtcagtttcacctgatttacgtaaaaacccgcttcggcgggtttttgcttttggaggggcagaaagatgaatgactgtccacgacgctatacccaaaagaaa

SEQ ID NO: 344 - DNA, 5122 bp, synthetic construct
  source 1..5122: mol_type = other DNA
aggctaggtggaggctcagtgatgataagtctgcgatggtggatgcatgtgtcatggtcatagctgtttcctgtgtgaaattgttatccgctcagagggcacaatcctattccgcgctatccgacaatctccaagacattaggtggagttcagttcggcgagcggaaatggcttacgaacggggcggagatttcctggaagatgccaggaagatacttaacagggaagtgagagggccgcggcaaagccgtttttccataggctccgcccccctgacaagcatcacgaaatctgacgctcaaatcagtggtggcgaaacccgacaggactataaagataccaggcgtttccccctggcggctccctcgtgcgctctcctgttcctgcctttcggtttaccggtgtcattccgctgttatggccgcgtttgtctcattccacgcctgacactcagttccgggtaggcagttcgctccaagctggactgtatgcacgaaccccccgttcagtccgaccgctgcgccttatccggtaactatcgtcttgagtccaacccggaaagacatgcaaaagcaccactggcagcagccactggtaattgatttagaggagttagtcttgaagtcatgcgccggttaaggctaaactgaaaggacaagttttggtgactgcgctcctccaagccagttacctcggttcaaagagttggtagctcagagaaccttcgaaaaaccgccctgcaaggcggttttttcgttttcagagcaagagattacgcgcagaccaaaacgatctcaagaagatcatcttattaagtctgacgctctattcaacaaagccgccgtccatgggtagggggcttcaaatcgtcctcgtgataccaattcggagcctgcttttttgtacaaacttgttgataatggcaattcaaggatcttcacctagatccttttaaattaaaaatgaagttttaaatcaatctaaagtatatatgagtaaacttggtctgacagttaccaatgcttaatcagtgaggcacctatctcagcgatctgtctatttcgttcatccatagttgcctgactccccgtcgtgtagataactacgatacgggagggcttaccatctggccccagtgctgcaatgataccgcgagagccacgctcaccggctccagatttatcagcaataaaccagccagccggaagggccgagcgcagaagtggtcctgcaactttatccgcctccatccagtctattaattgttgccgggaagctagagtaagtagttcgccagttaatagtttgcgcaacgttgttgccattgctacaggcatcgtggtgtcacgctcgtcgtttggtatggcttcattcagctccggttcccaacgatcaaggcgagttacatgatcccccatgttgtgcaaaaaagcggttagctccttcggtcctccgatcgttgtcagaagtaagttggccgcagtgttatcactcatggttatggcagcactgcataattctcttactgtcatgccatccgtaagatgcttttctgtgactggtgagtactcaaccaagtcattctgagaatagtgtatgcggcgaccgagttgctcttgcccggcgtcaatacgggataataccgcgccacatagcagaactttaaaagtgctcatcattggaaaacgttcttcggggcgaaaactctcaaggatcttaccgctgttgagatccagttcgatgtaacccactcgtgcacccaactgatcttcagcatcttttactttcaccagcgtttctgggtgagcaaaaacaggaaggcaaaatgccgcaaaaaagggaataagggcgacacggaaatgttgaatactcatactcttcctttttcaatattattgaagcatttatcagggttattgtctcatgagcggatacatatttgaatgtatttagaaaaataaacaaataggggttccgcgcacatttccccgaaaagtgccagatacctgaaacaaaacccatcgtacggccaaggaagtctccaataactgtgatccaccacaagcgccagggttttcccagtcacgacgttgtaaaacgacggccagtcatgcataatccgcacgcatctggaataaggaagtgccattccgcctgacctttgcctatgaggaccaaaacgaaaaaacaccctttcgggtgtcttttctggaatttggtaccgagaggctccatgattcagtatgacttgcctttggtcgaaaaaaaaagcccgcactgtcaggtgcgggcttttttctgtgtttccttattaggacccactttcacatttaagttgtttttctaatccgcatatgatcaattcaaggccgaataagaaggctggctctgcaccttggtgatcaaataattcgatagcttgtcgtaataatggcggcatactatcagtagtaggtgtttccctttcttctttagcgacttgatgctcttgatcttccaatacgcaacctaaagtaaaatgccccacagcgctgagtgcatataatgcattctctagtgaaaaaccttgttggcataaaaaggctaattgattttcgagagtttcatactgtttttctgtaggccgtgtacctaaatgtacttttgctccatcgcgatgacttagtaaagcacatctaaaacttttagcgttattacgtaaaaaatcttgccagctttccccttctaaagggcaaaagtgagtatggtgcctatctaacatctcaatggctaaggcgtcgagcaaagcccgcttattttttacatgccaatacaatgtaggctgctctacacctagcttctgggcgagtttacgggttgttaaaccttcgattccgacctcattaagcagctctaatgcgctgttaatcactttacttttatctaatctggacatattcaccaccctgaattgactctcttccgggcgctatcatgccataccgcgaaaggttttgcgccattcgatggcgcgccgccattgcttgtgcaatgtacatcagagattttgagacacaaccaattattgaaggcctccctaacggggggcctttttttgtttctggtcccccgcttaacgatcgttggctgttttcagcaggacgcactgacctccctatcagtgatagagattgacatccctatcagtgatagagatactgagcacagctgtcaccggatgtgctttccggtctgatgagtccgtgaggacgaaacagcctctacaaataattttgtttaaatcacacgggtaaggaggtatttaaatgaaaacactgtcccaagcacagtcgaagacgagtagccagcagttttctttcaccggtaattctagcgctaacgtgattatcggcaaccagaaactaactatcaacgacgtcgcccgcgttgctcggaacgggaccttagtaagcctgactaacaacactgatatacttcaaggcattcaggcgtcctgtgattatatcaataacgcagttgagtctggtgaaccaatttacggtgtgacctcaggcttcggcggtatggcgaacgttgctatcagccgtgaacaggcctccgaactgcaagagaatttggtatggagtctgaaaactggtgctgggaacaaactccctttggcggacgtacgtgcagcaatgctgctgcgcgccaactcgcatatgcgtggcgcgtccggtatccgtctggagctgatcaaacgtatggaaatcttcttgaacgctggtgttactccgtacgtttatgaatttggatctatcggcgcttctggagatctggtcccgctgagctacattacgggttccctgattggccttgacccgagcttcaaggtggatttcaacggcaaagaaatggacgccccgaccgcgttacgccagttaaatctgtctcccctgacacttctgcctaaagaagcgctagctatgaataatgggacctcagtcatgactggcatcgcagctaactgcgtatacgacacccagatcctgactgcgattgcaatgggtgttcacgctctggatatccaggccctgaacggcaccaaccagtctttccacccgtttatccataactctaagccgcacccaggtcagctgtgggcggctgatcagatgatatcattgctggctaactcgcaactggtacgggacgagctggacggcaaacatgattaccgcgaccacgagctgatccaggatcgttatagcctgcgttgccttccgcagtacctgggtccgattgtggacggtatctcacagatagcaaaacaaatcgaaattgaaattaactccgttactgataaccctctgattgacgtcgataaccaggcgtcgtaccacggcggaaatttcctgggtcagtatgttggcatgggtatggaccaccttcgctactatatcggcctgctggcgaaacacctggatgtgcagattgcgctgctagctagtcccgaatttagcaacggactgccgccatctttattgggcaaccgtgaacgtaaggttaacatgggtctgaaaggtttacaaatctgtggcaattccatcatgccgctgctgacgttctacggcaatagcatcgccgaccgctttccgacccatgcagagcaattcaaccagaatatcaactctcagggctacacctccgcaacgctggcgcgacgtagtgttgatatcttccaaaactacgttgcgattgccctgatgtttggcgtccaggctgtagacctgaggacttataaaaagactggccattacgatgcgcgtgcttgcctctctccggctaccgaacgcctgtattccgccgtgcgtcacgtagttggtcagaaacctacttcagatcgcccatacatctggaacgataacgagcagggtctggatgaacacatcgctcgcatctccgctgacattgccgctggcggagtaattgttcaagctgtacaggatatcctgccgtgcctgcactaaccggcttatcggtcagtttcacctgatttacgtaaaaacccgcttcggcgggtttttgcttttggaggggcagaaagatgaatgactgtccacgacgctatacccaaaagaaa

SEQ ID NO: 345 - DNA, 5122 bp, synthetic construct
  source 1..5122: mol_type = other DNA
aggctaggtggaggctcagtgatgataagtctgcgatggtggatgcatgtgtcatggtcatagctgtttcctgtgtgaaattgttatccgctcagagggcacaatcctattccgcgctatccgacaatctccaagacattaggtggagttcagttcggcgagcggaaatggcttacgaacggggcggagatttcctggaagatgccaggaagatacttaacagggaagtgagagggccgcggcaaagccgtttttccataggctccgcccccctgacaagcatcacgaaatctgacgctcaaatcagtggtggcgaaacccgacaggactataaagataccaggcgtttccccctggcggctccctcgtgcgctctcctgttcctgcctttcggtttaccggtgtcattccgctgttatggccgcgtttgtctcattccacgcctgacactcagttccgggtaggcagttcgctccaagctggactgtatgcacgaaccccccgttcagtccgaccgctgcgccttatccggtaactatcgtcttgagtccaacccggaaagacatgcaaaagcaccactggcagcagccactggtaattgatttagaggagttagtcttgaagtcatgcgccggttaaggctaaactgaaaggacaagttttggtgactgcgctcctccaagccagttacctcggttcaaagagttggtagctcagagaaccttcgaaaaaccgccctgcaaggcggttttttcgttttcagagcaagagattacgcgcagaccaaaacgatctcaagaagatcatcttattaagtctgacgctctattcaacaaagccgccgtccatgggtagggggcttcaaatcgtcctcgtgataccaattcggagcctgcttttttgtacaaacttgttgataatggcaattcaaggatcttcacctagatccttttaaattaaaaatgaagttttaaatcaatctaaagtatatatgagtaaacttggtctgacagttaccaatgcttaatcagtgaggcacctatctcagcgatctgtctatttcgttcatccatagttgcctgactccccgtcgtgtagataactacgatacgggagggcttaccatctggccccagtgctgcaatgataccgcgagagccacgctcaccggctccagatttatcagcaataaaccagccagccggaagggccgagcgcagaagtggtcctgcaactttatccgcctccatccagtctattaattgttgccgggaagctagagtaagtagttcgccagttaatagtttgcgcaacgttgttgccattgctacaggcatcgtggtgtcacgctcgtcgtttggtatggcttcattcagctccggttcccaacgatcaaggcgagttacatgatcccccatgttgtgcaaaaaagcggttagctccttcggtcctccgatcgttgtcagaagtaagttggccgcagtgttatcactcatggttatggcagcactgcataattctcttactgtcatgccatccgtaagatgcttttctgtgactggtgagtactcaaccaagtcattctgagaatagtgtatgcggcgaccgagttgctcttgcccggcgtcaatacgggataataccgcgccacatagcagaactttaaaagtgctcatcattggaaaacgttcttcggggcgaaaactctcaaggatcttaccgctgttgagatccagttcgatgtaacccactcgtgcacccaactgatcttcagcatcttttactttcaccagcgtttctgggtgagcaaaaacaggaaggcaaaatgccgcaaaaaagggaataagggcgacacggaaatgttgaatactcatactcttcctttttcaatattattgaagcatttatcagggttattgtctcatgagcggatacatatttgaatgtatttagaaaaataaacaaataggggttccgcgcacatttccccgaaaagtgccagatacctgaaacaaaacccatcgtacggccaaggaagtctccaataactgtgatccaccacaagcgccagggttttcccagtcacgacgttgtaaaacgacggccagtcatgcataatccgcacgcatctggaataaggaagtgccattccgcctgacctttgcctatgaggaccaaaacgaaaaaacaccctttcgggtgtcttttctggaatttggtaccgagaggctccatgattcagtatgacttgcctttggtcgaaaaaaaaagcccgcactgtcaggtgcgggcttttttctgtgtttccttattaggacccactttcacatttaagttgtttttctaatccgcatatgatcaattcaaggccgaataagaaggctggctctgcaccttggtgatcaaataattcgatagcttgtcgtaataatggcggcatactatcagtagtaggtgtttccctttcttctttagcgacttgatgctcttgatcttccaatacgcaacctaaagtaaaatgccccacagcgctgagtgcatataatgcattctctagtgaaaaaccttgttggcataaaaaggctaattgattttcgagagtttcatactgtttttctgtaggccgtgtacctaaatgtacttttgctccatcgcgatgacttagtaaagcacatctaaaacttttagcgttattacgtaaaaaatcttgccagctttccccttctaaagggcaaaagtgagtatggtgcctatctaacatctcaatggctaaggcgtcgagcaaagcccgcttattttttacatgccaatacaatgtaggctgctctacacctagcttctgggcgagtttacgggttgttaaaccttcgattccgacctcattaagcagctctaatgcgctgttaatcactttacttttatctaatctggacatattcaccaccctgaattgactctcttccgggcgctatcatgccataccgcgaaaggttttgcgccattcgatggcgcgccgccattgcttgtgcaatgtacatcagagattttgagacacaaccaattattgaaggcctccctaacggggggcctttttttgtttctggtcccccgcttaacgatcgttggctgttttcagcaggacgcactgacctccctatcagtgatagagattgacatccctatcagtgatagagatactgagcacagctgtcaccggatgtgctttccggtctgatgagtccgtgaggacgaaacagcctctacaaataattttgtttaaatcacacgggtaaggaggtatttaaatgaaaacactgtcccaagcacagtcgaagacgagtagccagcagttttctttcaccggtaattctagcgctaacgtgattatcggcaaccagaaactaactatcaacgacgtcgcccgcgttgctcggaacgggaccttagtaagcctgactaacaacactgatatacttcaaggcattcaggcgtcctgtgattatatcaataacgcagttgagtctggtgaaccaatttacggtgtgacctcaggcttcggcggtatggcgaacgttgctatcagccgtgaacaggcctccgaactgcaacacaatgtcgtatggtatcataaaactggtgctgggaacaaactccctttggcggacgtacgtgcagcaatgctgctgcgcgccaactcgcatatgcgtggcgcgtccggtatccgtctggagctgatcaaacgtatggaaatcttcttgaacgctggtgttactccgtacgtttatgaatttggatctatcggcgcttctggagatctggtcccgctgagctacattacgggttccctgattggccttgacccgagcttcaaggtggatttcaacggcaaagaaatggacgccccgaccgcgttacgccagttaaatctgtctcccctgacacttctgcctaaagaaggtattgctatggtgaatgggacctcagtcatgactggcatcgcagctaactgcgtatacgacacccagatcctgactgcgattgcaatgggtgttcacgctctggatatccaggccctgaacggcaccaaccagtctttccacccgtttatccataactctaagccgcacccaggtcagctgtgggcggctgatcagatgatatcattgctggctaactcgcaactggtacgggacgagctggacggcaaacatgattaccgcgaccacgagctgatccaggatcgttatagcctgcgttgccttccgcagtacctgggtccgattgtggacggtatctcacagatagcaaaacaaatcgaaattgaaattaactccgttactgataaccctctgattgacgtcgataaccaggcgtcgtaccacggcggaaatttcctgggtcagtatgttggcatgggtatggaccaccttcgctactatatcggcctgctggcgaaacacctggatgtgcagattgcgctgctagctagtcccgaatttagcaacggactgccgccatctttattgggcaaccgtgaacgtaaggttaacatgggtctgaaaggtttacaaatctgtggcaattccatcatgccgctgctgacgttctacggcaatagcatcgccgaccgctttccgacccatgcagagcaattcaaccagaatatcaactctcagggctacacctccgcaacgctggcgcgacgtagtgttgatatcttccaaaactacgttgcgattgccctgatgtttggcgtccaggctgtagacctgaggacttataaaaagactggccattacgatgcgcgtgcttgcctctctccggctaccgaacgcctgtattccgccgtgcgtcacgtagttggtcagaaacctacttcagatcgcccatacatctggaacgataacgagcagggtctggatgaacacatcgctcgcatctccgctgacattgccgctggcggagtaattgttcaagctgtacaggatatcctgccgtgcctgcactaaccggcttatcggtcagtttcacctgatttacgtaaaaacccgcttcggcgggtttttgcttttggaggggcagaaagatgaatgactgtccacgacgctatacccaaaagaaa

SEQ ID NO: 346 - DNA, 5122 bp, synthetic construct
  source 1..5122: mol_type = other DNA
aggctaggtggaggctcagtgatgataagtctgcgatggtggatgcatgtgtcatggtcatagctgtttcctgtgtgaaattgttatccgctcagagggcacaatcctattccgcgctatccgacaatctccaagacattaggtggagttcagttcggcgagcggaaatggcttacgaacggggcggagatttcctggaagatgccaggaagatacttaacagggaagtgagagggccgcggcaaagccgtttttccataggctccgcccccctgacaagcatcacgaaatctgacgctcaaatcagtggtggcgaaacccgacaggactataaagataccaggcgtttccccctggcggctccctcgtgcgctctcctgttcctgcctttcggtttaccggtgtcattccgctgttatggccgcgtttgtctcattccacgcctgacactcagttccgggtaggcagttcgctccaagctggactgtatgcacgaaccccccgttcagtccgaccgctgcgccttatccggtaactatcgtcttgagtccaacccggaaagacatgcaaaagcaccactggcagcagccactggtaattgatttagaggagttagtcttgaagtcatgcgccggttaaggctaaactgaaaggacaagttttggtgactgcgctcctccaagccagttacctcggttcaaagagttggtagctcagagaaccttcgaaaaaccgccctgcaaggcggttttttcgttttcagagcaagagattacgcgcagaccaaaacgatctcaagaagatcatcttattaagtctgacgctctattcaacaaagccgccgtccatgggtagggggcttcaaatcgtcctcgtgataccaattcggagcctgcttttttgtacaaacttgttgataatggcaattcaaggatcttcacctagatccttttaaattaaaaatgaagttttaaatcaatctaaagtatatatgagtaaacttggtctgacagttaccaatgcttaatcagtgaggcacctatctcagcgatctgtctatttcgttcatccatagttgcctgactccccgtcgtgtagataactacgatacgggagggcttaccatctggccccagtgctgcaatgataccgcgagagccacgctcaccggctccagatttatcagcaataaaccagccagccggaagggccgagcgcagaagtggtcctgcaactttatccgcctccatccagtctattaattgttgccgggaagctagagtaagtagttcgccagttaatagtttgcgcaacgttgttgccattgctacaggcatcgtggtgtcacgctcgtcgtttggtatggcttcattcagctccggttcccaacgatcaaggcgagttacatgatcccccatgttgtgcaaaaaagcggttagctccttcggtcctccgatcgttgtcagaagtaagttggccgcagtgttatcactcatggttatggcagcactgcataattctcttactgtcatgccatccgtaagatgcttttctgtgactggtgagtactcaaccaagtcattctgagaatagtgtatgcggcgaccgagttgctcttgcccggcgtcaatacgggataataccgcgccacatagcagaactttaaaagtgctcatcattggaaaacgttcttcggggcgaaaactctcaaggatcttaccgctgttgagatccagttcgatgtaacccactcgtgcacccaactgatcttcagcatcttttactttcaccagcgtttctgggtgagcaaaaacaggaaggcaaaatgccgcaaaaaagggaataagggcgacacggaaatgttgaatactcatactcttcctttttcaatattattgaagcatttatcagggttattgtctcatgagcggatacatatttgaatgtatttagaaaaataaacaaataggggttccgcgcacatttccccgaaaagtgccagatacctgaaacaaaacccatcgtacggccaaggaagtctccaataactgtgatccaccacaagcgccagggttttcccagtcacgacgttgtaaaacgacggccagtcatgcataatccgcacgcatctggaataaggaagtgccattccgcctgacctttgcctatgaggaccaaaacgaaaaaacaccctttcgggtgtcttttctggaatttggtaccgagaggctccatgattcagtatgacttgcctttggtcgaaaaaaaaagcccgcactgtcaggtgcgggcttttttctgtgtttccttattaggacccactttcacatttaagttgtttttctaatccgcatatgatcaattcaaggccgaataagaaggctggctctgcaccttggtgatcaaataattcgatagcttgtcgtaataatggcggcatactatcagtagtaggtgtttccctttcttctttagcgacttgatgctcttgatcttccaatacgcaacctaaagtaaaatgccccacagcgctgagtgcatataatgcattctctagtgaaaaaccttgttggcataaaaaggctaattgattttcgagagtttcatactgtttttctgtaggccgtgtacctaaatgtacttttgctccatcgcgatgacttagtaaagcacatctaaaacttttagcgttattacgtaaaaaatcttgccagctttccccttctaaagggcaaaagtgagtatggtgcctatctaacatctcaatggctaaggcgtcgagcaaagcccgcttattttttacatgccaatacaatgtaggctgctctacacctagcttctgggcgagtttacgggttgttaaaccttcgattccgacctcattaagcagctctaatgcgctgttaatcactttacttttatctaatctggacatattcaccaccctgaattgactctcttccgggcgctatcatgccataccgcgaaaggttttgcgccattcgatggcgcgccgccattgcttgtgcaatgtacatcagagattttgagacacaaccaattattgaaggcctccctaacggggggcctttttttgtttctggtcccccgcttaacgatcgttggctgttttcagcaggacgcactgacctccctatcagtgatagagattgacatccctatcagtgatagagatactgagcacagctgtcaccggatgtgctttccggtctgatgagtccgtgaggacgaaacagcctctacaaataattttgtttaaatcacacgggtaaggaggtatttaaatgaaaacactgtcccaagcacagtcgaagacgagtagccagcagttttctttcaccggtaattctagcgctaacgtgattatcggcaaccagaaactaactatcaacgacgtcgcccgcgttgctcggaacgggaccttagtaagcctgactaacaacactgatatacttcaaggcattcaggcgtcctgtgattatatcaataacgcagttgagtctggtgaaccaatttacggtgtgacctcaggcttcggcggtatggcgaacgttgctatcagccgtgaacaggcctccgaactgcaagagaatttggtatggtatatgaaaactggtgctgggaacaaactccctttggcggacgtacgtgcagcaatgctgctgcgcgccaactcgcatatgcgtggcgcgtccggtatccgtctggagctgatcaaacgtatggaaatcttcttgaacgctggtgttactccgtacgtttatgaatttggatctatcggcgcttctggagatctggtcccgctgagctacattacgggttccctgattggccttgacccgagcttcaaggtggatttcaacggcaaagaaatggacgccccgaccgcgttacgccagttaaatctgtctcccctgacacttctgcctaaagaaggtattgctatggtgaatgggacctcagtcatgactggcatcgcagctaactgcgtatacgacacccagatcctgactgcgattgcaatgggtgttcacgctctggatatccaggccctgaacggcaccaaccagtctttccacccgtttatccataactctaagccgcacccaggtcagctgtgggcggctgatcagatgatatcattgctggctaactcgcaactggtacgggacgagctggacggcaaacatgattaccgcgaccacgagctgatccaggatcgttatagcctgcgttgccttccgcagtacctgggtccgattgtggacggtatctcacagatagcaaaacaaatcgaaattgaaattaactccgttactgataaccctctgattgacgtcgataaccaggcgtcgtaccacggcggaaatttcctgggtcagtatgttggcatgggtatggaccaccttcgctactatatcggcctgctggcgaaacacctggatgtgcagattgcgctgctagctagtcccgaatttagcaacggactgccgccatctttattgggcaaccgtgaacgtaaggttaacatgggtctgaaaggtttacaaatctgtggcaattccatcatgccgctgctgacgttctacggcaatagcatcgccgaccgctttccgacccatgcagagcaattcaaccagaatatcaactctcagggctacacctccgcaacgctggcgcgacgtagtgttgatatcttccaaaactacgttgcgattgccctgatgtttggcgtccaggctgtagacctgaggacttataaaaagactggccattacgatgcgcgtgcttgcctctctccggctaccgaacgcctgtattccgccgtgcgtcacgtagttggtcagaaacctacttcagatcgcccatacatctggaacgataacgagcagggtctggatgaacacatcgctcgcatctccgctgacattgccgctggcggagtaattgttcaagctgtacaggatatcctgccgtgcctgcactaaccggcttatcggtcagtttcacctgatttacgtaaaaacccgcttcggcgggtttttgcttttggaggggcagaaagatgaatgactgtccacgacgctatacccaaaagaaa

SEQ ID NO: 347 - DNA, 5122 bp, synthetic construct
  source 1..5122: mol_type = other DNA
aggctaggtggaggctcagtgatgataagtctgcgatggtggatgcatgtgtcatggtcatagctgtttcctgtgtgaaattgttatccgctcagagggcacaatcctattccgcgctatccgacaatctccaagacattaggtggagttcagttcggcgagcggaaatggcttacgaacggggcggagatttcctggaagatgccaggaagatacttaacagggaagtgagagggccgcggcaaagccgtttttccataggctccgcccccctgacaagcatcacgaaatctgacgctcaaatcagtggtggcgaaacccgacaggactataaagataccaggcgtttccccctggcggctccctcgtgcgctctcctgttcctgcctttcggtttaccggtgtcattccgctgttatggccgcgtttgtctcattccacgcctgacactcagttccgggtaggcagttcgctccaagctggactgtatgcacgaaccccccgttcagtccgaccgctgcgccttatccggtaactatcgtcttgagtccaacccggaaagacatgcaaaagcaccactggcagcagccactggtaattgatttagaggagttagtcttgaagtcatgcgccggttaaggctaaactgaaaggacaagttttggtgactgcgctcctccaagccagttacctcggttcaaagagttggtagctcagagaaccttcgaaaaaccgccctgcaaggcggttttttcgttttcagagcaagagattacgcgcagaccaaaacgatctcaagaagatcatcttattaagtctgacgctctattcaacaaagccgccgtccatgggtagggggcttcaaatcgtcctcgtgataccaattcggagcctgcttttttgtacaaacttgttgataatggcaattcaaggatcttcacctagatccttttaaattaaaaatgaagttttaaatcaatctaaagtatatatgagtaaacttggtctgacagttaccaatgcttaatcagtgaggcacctatctcagcgatctgtctatttcgttcatccatagttgcctgactccccgtcgtgtagataactacgatacgggagggcttaccatctggccccagtgctgcaatgataccgcgagagccacgctcaccggctccagatttatcagcaataaaccagccagccggaagggccgagcgcagaagtggtcctgcaactttatccgcctccatccagtctattaattgttgccgggaagctagagtaagtagttcgccagttaatagtttgcgcaacgttgttgccattgctacaggcatcgtggtgtcacgctcgtcgtttggtatggcttcattcagctccggttcccaacgatcaaggcgagttacatgatcccccatgttgtgcaaaaaagcggttagctccttcggtcctccgatcgttgtcagaagtaagttggccgcagtgttatcactcatggttatggcagcactgcataattctcttactgtcatgccatccgtaagatgcttttctgtgactggtgagtactcaaccaagtcattctgagaatagtgtatgcggcgaccgagttgctcttgcccggcgtcaatacgggataataccgcgccacatagcagaactttaaaagtgctcatcattggaaaacgttcttcggggcgaaaactctcaaggatcttaccgctgttgagatccagttcgatgtaacccactcgtgcacccaactgatcttcagcatcttttactttcaccagcgtttctgggtgagcaaaaacaggaaggcaaaatgccgcaaaaaagggaataagggcgacacggaaatgttgaatactcatactcttcctttttcaatattattgaagcatttatcagggttattgtctcatgagcggatacatatttgaatgtatttagaaaaataaacaaataggggttccgcgcacatttccccgaaaagtgccagatacctgaaacaaaacccatcgtacggccaaggaagtctccaataactgtgatccaccacaagcgccagggttttcccagtcacgacgttgtaaaacgacggccagtcatgcataatccgcacgcatctggaataaggaagtgccattccgcctgacctttgcctatgaggaccaaaacgaaaaaacaccctttcgggtgtcttttctggaatttggtaccgagaggctccatgattcagtatgacttgcctttggtcgaaaaaaaaagcccgcactgtcaggtgcgggcttttttctgtgtttccttattaggacccactttcacatttaagttgtttttctaatccgcatatgatcaattcaaggccgaataagaaggctggctctgcaccttggtgatcaaataattcgatagcttgtcgtaataatggcggcatactatcagtagtaggtgtttccctttcttctttagcgacttgatgctcttgatcttccaatacgcaacctaaagtaaaatgccccacagcgctgagtgcatataatgcattctctagtgaaaaaccttgttggcataaaaaggctaattgattttcgagagtttcatactgtttttctgtaggccgtgtacctaaatgtacttttgctccatcgcgatgacttagtaaagcacatctaaaacttttagcgttattacgtaaaaaatcttgccagctttccccttctaaagggcaaaagtgagtatggtgcctatctaacatctcaatggctaaggcgtcgagcaaagcccgcttattttttacatgccaatacaatgtaggctgctctacacctagcttctgggcgagtttacgggttgttaaaccttcgattccgacctcattaagcagctctaatgcgctgttaatcactttacttttatctaatctggacatattcaccaccctgaattgactctcttccgggcgctatcatgccataccgcgaaaggttttgcgccattcgatggcgcgccgccattgcttgtgcaatgtacatcagagattttgagacacaaccaattattgaaggcctccctaacggggggcctttttttgtttctggtcccccgcttaacgatcgttggctgttttcagcaggacgcactgacctccctatcagtgatagagattgacatccctatcagtgatagagatactgagcacagctgtcaccggatgtgctttccggtctgatgagtccgtgaggacgaaacagcctctacaaataattttgtttaaatcacacgggtaaggaggtatttaaatgaaaacactgtcccaagcacagtcgaagacgagtagccagcagttttctttcaccggtaattctagcgctaacgtgattatcggcaaccagaaactaactatcaacgacgtcgcccgcgttgctcggaacgggaccttagtaagcctgactaacaacactgatatacttcaaggcattcaggcgtcctgtgattatatcaataacgcagttgagtctggtgaaccaatttacggtgtgacctcaggcttcggcggtatggcgaacgttgctatcagccgtgaacaggcctccgaactgcaacataatattgtatggcacctgaaaactggtgctgggaacaaactccctttggcggacgtacgtgcagcaatgctgctgcgcgccaactcgcatatgcgtggcgcgtccggtatccgtctggagctgatcaaacgtatggaaatcttcttgaacgctggtgttactccgtacgtttatgaatttggatctatcggcgcttctggagatctggtcccgctgagctacattacgggttccctgattggccttgacccgagcttcaaggtggatttcaacggcaaagaaatggacgccccgaccgcgttacgccagttaaatctgtctcccctgacacttctgcctaaagaaggtatagctatggtcaatgggacctcagtcatgactggcatcgcagctaactgcgtatacgacacccagatcctgactgcgattgcaatgggtgttcacgctctggatatccaggccctgaacggcaccaaccagtctttccacccgtttatccataactctaagccgcacccaggtcagctgtgggcggctgatcagatgatatcattgctggctaactcgcaactggtacgggacgagctggacggcaaacatgattaccgcgaccacgagctgatccaggatcgttatagcctgcgttgccttccgcagtacctgggtccgattgtggacggtatctcacagatagcaaaacaaatcgaaattgaaattaactccgttactgataaccctctgattgacgtcgataaccaggcgtcgtaccacggcggaaatttcctgggtcagtatgttggcatgggtatggaccaccttcgctactatatcggcctgctggcgaaacacctggatgtgcagattgcgctgctagctagtcccgaatttagcaacggactgccgccatctttattgggcaaccgtgaacgtaaggttaacatgggtctgaaaggtttacaaatctgtggcaattccatcatgccgctgctgacgttctacggcaatagcatcgccgaccgctttccgacccatgcagagcaattcaaccagaatatcaactctcagggctacacctccgcaacgctggcgcgacgtagtgttgatatcttccaaaactacgttgcgattgccctgatgtttggcgtccaggctgtagacctgaggacttataaaaagactggccattacgatgcgcgtgcttgcctctctccggctaccgaacgcctgtattccgccgtgcgtcacgtagttggtcagaaacctacttcagatcgcccatacatctggaacgataacgagcagggtctggatgaacacatcgctcgcatctccgctgacattgccgctggcggagtaattgttcaagctgtacaggatatcctgccgtgcctgcactaaccggcttatcggtcagtttcacctgatttacgtaaaaacccgcttcggcgggtttttgcttttggaggggcagaaagatgaatgactgtccacgacgctatacccaaaagaaa

SEQ ID NO: 348 - DNA, 5122 bp, synthetic construct
  source 1..5122: mol_type = other DNA
aggctaggtggaggctcagtgatgataagtctgcgatggtggatgcatgtgtcatggtcatagctgtttcctgtgtgaaattgttatccgctcagagggcacaatcctattccgcgctatccgacaatctccaagacattaggtggagttcagttcggcgagcggaaatggcttacgaacggggcggagatttcctggaagatgccaggaagatacttaacagggaagtgagagggccgcggcaaagccgtttttccataggctccgcccccctgacaagcatcacgaaatctgacgctcaaatcagtggtggcgaaacccgacaggactataaagataccaggcgtttccccctggcggctccctcgtgcgctctcctgttcctgcctttcggtttaccggtgtcattccgctgttatggccgcgtttgtctcattccacgcctgacactcagttccgggtaggcagttcgctccaagctggactgtatgcacgaaccccccgttcagtccgaccgctgcgccttatccggtaactatcgtcttgagtccaacccggaaagacatgcaaaagcaccactggcagcagccactggtaattgatttagaggagttagtcttgaagtcatgcgccggttaaggctaaactgaaaggacaagttttggtgactgcgctcctccaagccagttacctcggttcaaagagttggtagctcagagaaccttcgaaaaaccgccctgcaaggcggttttttcgttttcagagcaagagattacgcgcagaccaaaacgatctcaagaagatcatcttattaagtctgacgctctattcaacaaagccgccgtccatgggtagggggcttcaaatcgtcctcgtgataccaattcggagcctgcttttttgtacaaacttgttgataatggcaattcaaggatcttcacctagatccttttaaattaaaaatgaagttttaaatcaatctaaagtatatatgagtaaacttggtctgacagttaccaatgcttaatcagtgaggcacctatctcagcgatctgtctatttcgttcatccatagttgcctgactccccgtcgtgtagataactacgatacgggagggcttaccatctggccccagtgctgcaatgataccgcgagagccacgctcaccggctccagatttatcagcaataaaccagccagccggaagggccgagcgcagaagtggtcctgcaactttatccgcctccatccagtctattaattgttgccgggaagctagagtaagtagttcgccagttaatagtttgcgcaacgttgttgccattgctacaggcatcgtggtgtcacgctcgtcgtttggtatggcttcattcagctccggttcccaacgatcaaggcgagttacatgatcccccatgttgtgcaaaaaagcggttagctccttcggtcctccgatcgttgtcagaagtaagttggccgcagtgttatcactcatggttatggcagcactgcataattctcttactgtcatgccatccgtaagatgcttttctgtgactggtgagtactcaaccaagtcattctgagaatagtgtatgcggcgaccgagttgctcttgcccggcgtcaatacgggataataccgcgccacatagcagaactttaaaagtgctcatcattggaaaacgttcttcggggcgaaaactctcaaggatcttaccgctgttgagatccagttcgatgtaacccactcgtgcacccaactgatcttcagcatcttttactttcaccagcgtttctgggtgagcaaaaacaggaaggcaaaatgccgcaaaaaagggaataagggcgacacggaaatgttgaatactcatactcttcctttttcaatattattgaagcatttatcagggttattgtctcatgagcggatacatatttgaatgtatttagaaaaataaacaaataggggttccgcgcacatttccccgaaaagtgccagatacctgaaacaaaacccatcgtacggccaaggaagtctccaataactgtgatccaccacaagcgccagggttttcccagtcacgacgttgtaaaacgacggccagtcatgcataatccgcacgcatctggaataaggaagtgccattccgcctgacctttgcctatgaggaccaaaacgaaaaaacaccctttcgggtgtcttttctggaatttggtaccgagaggctccatgattcagtatgacttgcctttggtcgaaaaaaaaagcccgcactgtcaggtgcgggcttttttctgtgtttccttattaggacccactttcacatttaagttgtttttctaatccgcatatgatcaattcaaggccgaataagaaggctggctctgcaccttggtgatcaaataattcgatagcttgtcgtaataatggcggcatactatcagtagtaggtgtttccctttcttctttagcgacttgatgctcttgatcttccaatacgcaacctaaagtaaaatgccccacagcgctgagtgcatataatgcattctctagtgaaaaaccttgttggcataaaaaggctaattgattttcgagagtttcatactgtttttctgtaggccgtgtacctaaatgtacttttgctccatcgcgatgacttagtaaagcacatctaaaacttttagcgttattacgtaaaaaatcttgccagctttccccttctaaagggcaaaagtgagtatggtgcctatctaacatctcaatggctaaggcgtcgagcaaagcccgcttattttttacatgccaatacaatgtaggctgctctacacctagcttctgggcgagtttacgggttgttaaaccttcgattccgacctcattaagcagctctaatgcgctgttaatcactttacttttatctaatctggacatattcaccaccctgaattgactctcttccgggcgctatcatgccataccgcgaaaggttttgcgccattcgatggcgcgccgccattgcttgtgcaatgtacatcagagattttgagacacaaccaattattgaaggcctccctaacggggggcctttttttgtttctggtcccccgcttaacgatcgttggctgttttcagcaggacgcactgacctccctatcagtgatagagattgacatccctatcagtgatagagatactgagcacagctgtcaccggatgtgctttccggtctgatgagtccgtgaggacgaaacagcctctacaaataattttgtttaaatcacacgggtaaggaggtatttaaatgaaaacactgtcccaagcacagtcgaagacgagtagccagcagttttctttcaccggtaattctagcgctaacgtgattatcggcaaccagaaactaactatcaacgacgtcgcccgcgttgctcggaacgggaccttagtaagcctgactaacaacactgatatacttcaaggcattcaggcgtcctgtgattatatcaataacgcagttgagtctggtgaaccaatttacggtgtgacctcaggcttcggcggtatggcgaacgttgctatcagccgtgaacaggcctccgaactgcaaaagaatgcggtatggcacgtgaaaactggtgctgggaacaaactccctttggcggacgtacgtgcagcaatgctgctgcgcgccaactcgcatatgcgtggcgcgtccggtatccgtctggagctgatcaaacgtatggaaatcttcttgaacgctggtgttactccgtacgtttatgaatttggatctatcggcgcttctggagatctggtcccgctgagctacattacgggttccctgattggccttgacccgagcttcaaggtggatttcaacggcaaagaaatggacgccccgaccgcgttacgccagttaaatctgtctcccctgacacttctgcctaaagaagcgctagctatgatgaatgggacctcagtcatgactggcatcgcagctaactgcgtatacgacacccagatcctgactgcgattgcaatgggtgttcacgctctggatatccaggccctgaacggcaccaaccagtctttccacccgtttatccataactctaagccgcacccaggtcagctgtgggcggctgatcagatgatatcattgctggctaactcgcaactggtacgggacgagctggacggcaaacatgattaccgcgaccacgagctgatccaggatcgttatagcctgcgttgccttccgcagtacctgggtccgattgtggacggtatctcacagatagcaaaacaaatcgaaattgaaattaactccgttactgataaccctctgattgacgtcgataaccaggcgtcgtaccacggcggaaatttcctgggtcagtatgttggcatgggtatggaccaccttcgctactatatcggcctgctggcgaaacacctggatgtgcagattgcgctgctagctagtcccgaatttagcaacggactgccgccatctttattgggcaaccgtgaacgtaaggttaacatgggtctgaaaggtttacaaatctgtggcaattccatcatgccgctgctgacgttctacggcaatagcatcgccgaccgctttccgacccatgcagagcaattcaaccagaatatcaactctcagggctacacctccgcaacgctggcgcgacgtagtgttgatatcttccaaaactacgttgcgattgccctgatgtttggcgtccaggctgtagacctgaggacttataaaaagactggccattacgatgcgcgtgcttgcctctctccggctaccgaacgcctgtattccgccgtgcgtcacgtagttggtcagaaacctacttcagatcgcccatacatctggaacgataacgagcagggtctggatgaacacatcgctcgcatctccgctgacattgccgctggcggagtaattgttcaagctgtacaggatatcctgccgtgcctgcactaaccggcttatcggtcagtttcacctgatttacgtaaaaacccgcttcggcgggtttttgcttttggaggggcagaaagatgaatgactgtccacgacgctatacccaaaagaaa

SEQ ID NO: 349 - DNA, 5122 bp, synthetic construct
  source 1..5122: mol_type = other DNA
aggctaggtggaggctcagtgatgataagtctgcgatggtggatgcatgtgtcatggtcatagctgtttcctgtgtgaaattgttatccgctcagagggcacaatcctattccgcgctatccgacaatctccaagacattaggtggagttcagttcggcgagcggaaatggcttacgaacggggcggagatttcctggaagatgccaggaagatacttaacagggaagtgagagggccgcggcaaagccgtttttccataggctccgcccccctgacaagcatcacgaaatctgacgctcaaatcagtggtggcgaaacccgacaggactataaagataccaggcgtttccccctggcggctccctcgtgcgctctcctgttcctgcctttcggtttaccggtgtcattccgctgttatggccgcgtttgtctcattccacgcctgacactcagttccgggtaggcagttcgctccaagctggactgtatgcacgaaccccccgttcagtccgaccgctgcgccttatccggtaactatcgtcttgagtccaacccggaaagacatgcaaaagcaccactggcagcagccactggtaattgatttagaggagttagtcttgaagtcatgcgccggttaaggctaaactgaaaggacaagttttggtgactgcgctcctccaagccagttacctcggttcaaagagttggtagctcagagaaccttcgaaaaaccgccctgcaaggcggttttttcgttttcagagcaagagattacgcgcagaccaaaacgatctcaagaagatcatcttattaagtctgacgctctattcaacaaagccgccgtccatgggtagggggcttcaaatcgtcctcgtgataccaattcggagcctgcttttttgtacaaacttgttgataatggcaattcaaggatcttcacctagatccttttaaattaaaaatgaagttttaaatcaatctaaagtatatatgagtaaacttggtctgacagttaccaatgcttaatcagtgaggcacctatctcagcgatctgtctatttcgttcatccatagttgcctgactccccgtcgtgtagataactacgatacgggagggcttaccatctggccccagtgctgcaatgataccgcgagagccacgctcaccggctccagatttatcagcaataaaccagccagccggaagggccgagcgcagaagtggtcctgcaactttatccgcctccatccagtctattaattgttgccgggaagctagagtaagtagttcgccagttaatagtttgcgcaacgttgttgccattgctacaggcatcgtggtgtcacgctcgtcgtttggtatggcttcattcagctccggttcccaacgatcaaggcgagttacatgatcccccatgttgtgcaaaaaagcggttagctccttcggtcctccgatcgttgtcagaagtaagttggccgcagtgttatcactcatggttatggcagcactgcataattctcttactgtcatgccatccgtaagatgcttttctgtgactggtgagtactcaaccaagtcattctgagaatagtgtatgcggcgaccgagttgctcttgcccggcgtcaatacgggataataccgcgccacatagcagaactttaaaagtgctcatcattggaaaacgttcttcggggcgaaaactctcaaggatcttaccgctgttgagatccagttcgatgtaacccactcgtgcacccaactgatcttcagcatcttttactttcaccagcgtttctgggtgagcaaaaacaggaaggcaaaatgccgcaaaaaagggaataagggcgacacggaaatgttgaatactcatactcttcctttttcaatattattgaagcatttatcagggttattgtctcatgagcggatacatatttgaatgtatttagaaaaataaacaaataggggttccgcgcacatttccccgaaaagtgccagatacctgaaacaaaacccatcgtacggccaaggaagtctccaataactgtgatccaccacaagcgccagggttttcccagtcacgacgttgtaaaacgacggccagtcatgcataatccgcacgcatctggaataaggaagtgccattccgcctgacctttgcctatgaggaccaaaacgaaaaaacaccctttcgggtgtcttttctggaatttggtaccgagaggctccatgattcagtatgacttgcctttggtcgaaaaaaaaagcccgcactgtcaggtgcgggcttttttctgtgtttccttattaggacccactttcacatttaagttgtttttctaatccgcatatgatcaattcaaggccgaataagaaggctggctctgcaccttggtgatcaaataattcgatagcttgtcgtaataatggcggcatactatcagtagtaggtgtttccctttcttctttagcgacttgatgctcttgatcttccaatacgcaacctaaagtaaaatgccccacagcgctgagtgcatataatgcattctctagtgaaaaaccttgttggcataaaaaggctaattgattttcgagagtttcatactgtttttctgtaggccgtgtacctaaatgtacttttgctccatcgcgatgacttagtaaagcacatctaaaacttttagcgttattacgtaaaaaatcttgccagctttccccttctaaagggcaaaagtgagtatggtgcctatctaacatctcaatggctaaggcgtcgagcaaagcccgcttattttttacatgccaatacaatgtaggctgctctacacctagcttctgggcgagtttacgggttgttaaaccttcgattccgacctcattaagcagctctaatgcgctgttaatcactttacttttatctaatctggacatattcaccaccctgaattgactctcttccgggcgctatcatgccataccgcgaaaggttttgcgccattcgatggcgcgccgccattgcttgtgcaatgtacatcagagattttgagacacaaccaattattgaaggcctccctaacggggggcctttttttgtttctggtcccccgcttaacgatcgttggctgttttcagcaggacgcactgacctccctatcagtgatagagattgacatccctatcagtgatagagatactgagcacagctgtcaccggatgtgctttccggtctgatgagtccgtgaggacgaaacagcctctacaaataattttgtttaaatcacacgggtaaggaggtatttaaatgaaaacactgtcccaagcacagtcgaagacgagtagccagcagttttctttcaccggtaattctagcgctaacgtgattatcggcaaccagaaactaactatcaacgacgtcgcccgcgttgctcggaacgggaccttagtaagcctgactaacaacactgatatacttcaaggcattcaggcgtcctgtgattatatcaataacgcagttgagtctggtgaaccaatttacggtgtgacctcaggcttcggcggtatggcgaacgttgctatcagccgtgaacaggcctccgaactgcaaaagaatatggtatggcacctgaaaactggtgctgggaacaaactccctttggcggacgtacgtgcagcaatgctgctgcgcgccaactcgcatatgcgtggcgcgtccggtatccgtctggagctgatcaaacgtatggaaatcttcttgaacgctggtgttactccgtacgtttatgaatttggatctatcggcgcttctggagatctggtcccgctgagctacattacgggttccctgattggccttgacccgagcttcaaggtggatttcaacggcaaagaaatggacgccccgaccgcgttacgccagttaaatctgtctcccctgacacttctgcctaaagaagcgctagctatgacgaatgggacctcagtcatgactggcatcgcagctaactgcgtatacgacacccagatcctgactgcgattgcaatgggtgttcacgctctggatatccaggccctgaacggcaccaaccagtctttccacccgtttatccataactctaagccgcacccaggtcagctgtgggcggctgatcagatgatatcattgctggctaactcgcaactggtacgggacgagctggacggcaaacatgattaccgcgaccacgagctgatccaggatcgttatagcctgcgttgccttccgcagtacctgggtccgattgtggacggtatctcacagatagcaaaacaaatcgaaattgaaattaactccgttactgataaccctctgattgacgtcgataaccaggcgtcgtaccacggcggaaatttcctgggtcagtatgttggcatgggtatggaccaccttcgctactatatcggcctgctggcgaaacacctggatgtgcagattgcgctgctagctagtcccgaatttagcaacggactgccgccatctttattgggcaaccgtgaacgtaaggttaacatgggtctgaaaggtttacaaatctgtggcaattccatcatgccgctgctgacgttctacggcaatagcatcgccgaccgctttccgacccatgcagagcaattcaaccagaatatcaactctcagggctacacctccgcaacgctggcgcgacgtagtgttgatatcttccaaaactacgttgcgattgccctgatgtttggcgtccaggctgtagacctgaggacttataaaaagactggccattacgatgcgcgtgcttgcctctctccggctaccgaacgcctgtattccgccgtgcgtcacgtagttggtcagaaacctacttcagatcgcccatacatctggaacgataacgagcagggtctggatgaacacatcgctcgcatctccgctgacattgccgctggcggagtaattgttcaagctgtacaggatatcctgccgtgcctgcactaaccggcttatcggtcagtttcacctgatttacgtaaaaacccgcttcggcgggtttttgcttttggaggggcagaaagatgaatgactgtccacgacgctatacccaaaagaaa

SEQ ID NO: 350 - DNA, 5122 bp, synthetic construct
  source 1..5122: mol_type = other DNA
aggctaggtggaggctcagtgatgataagtctgcgatggtggatgcatgtgtcatggtcatagctgtttcctgtgtgaaattgttatccgctcagagggcacaatcctattccgcgctatccgacaatctccaagacattaggtggagttcagttcggcgagcggaaatggcttacgaacggggcggagatttcctggaagatgccaggaagatacttaacagggaagtgagagggccgcggcaaagccgtttttccataggctccgcccccctgacaagcatcacgaaatctgacgctcaaatcagtggtggcgaaacccgacaggactataaagataccaggcgtttccccctggcggctccctcgtgcgctctcctgttcctgcctttcggtttaccggtgtcattccgctgttatggccgcgtttgtctcattccacgcctgacactcagttccgggtaggcagttcgctccaagctggactgtatgcacgaaccccccgttcagtccgaccgctgcgccttatccggtaactatcgtcttgagtccaacccggaaagacatgcaaaagcaccactggcagcagccactggtaattgatttagaggagttagtcttgaagtcatgcgccggttaaggctaaactgaaaggacaagttttggtgactgcgctcctccaagccagttacctcggttcaaagagttggtagctcagagaaccttcgaaaaaccgccctgcaaggcggttttttcgttttcagagcaagagattacgcgcagaccaaaacgatctcaagaagatcatcttattaagtctgacgctctattcaacaaagccgccgtccatgggtagggggcttcaaatcgtcctcgtgataccaattcggagcctgcttttttgtacaaacttgttgataatggcaattcaaggatcttcacctagatccttttaaattaaaaatgaagttttaaatcaatctaaagtatatatgagtaaacttggtctgacagttaccaatgcttaatcagtgaggcacctatctcagcgatctgtctatttcgttcatccatagttgcctgactccccgtcgtgtagataactacgatacgggagggcttaccatctggccccagtgctgcaatgataccgcgagagccacgctcaccggctccagatttatcagcaataaaccagccagccggaagggccgagcgcagaagtggtcctgcaactttatccgcctccatccagtctattaattgttgccgggaagctagagtaagtagttcgccagttaatagtttgcgcaacgttgttgccattgctacaggcatcgtggtgtcacgctcgtcgtttggtatggcttcattcagctccggttcccaacgatcaaggcgagttacatgatcccccatgttgtgcaaaaaagcggttagctccttcggtcctccgatcgttgtcagaagtaagttggccgcagtgttatcactcatggttatggcagcactgcataattctcttactgtcatgccatccgtaagatgcttttctgtgactggtgagtactcaaccaagtcattctgagaatagtgtatgcggcgaccgagttgctcttgcccggcgtcaatacgggataataccgcgccacatagcagaactttaaaagtgctcatcattggaaaacgttcttcggggcgaaaactctcaaggatcttaccgctgttgagatccagttcgatgtaacccactcgtgcacccaactgatcttcagcatcttttactttcaccagcgtttctgggtgagcaaaaacaggaaggcaaaatgccgcaaaaaagggaataagggcgacacggaaatgttgaatactcatactcttcctttttcaatattattgaagcatttatcagggttattgtctcatgagcggatacatatttgaatgtatttagaaaaataaacaaataggggttccgcgcacatttccccgaaaagtgccagatacctgaaacaaaacccatcgtacggccaaggaagtctccaataactgtgatccaccacaagcgccagggttttcccagtcacgacgttgtaaaacgacggccagtcatgcataatccgcacgcatctggaataaggaagtgccattccgcctgacctttgcctatgaggaccaaaacgaaaaaacaccctttcgggtgtcttttctggaatttggtaccgagaggctccatgattcagtatgacttgcctttggtcgaaaaaaaaagcccgcactgtcaggtgcgggcttttttctgtgtttccttattaggacccactttcacatttaagttgtttttctaatccgcatatgatcaattcaaggccgaataagaaggctggctctgcaccttggtgatcaaataattcgatagcttgtcgtaataatggcggcatactatcagtagtaggtgtttccctttcttctttagcgacttgatgctcttgatcttccaatacgcaacctaaagtaaaatgccccacagcgctgagtgcatataatgcattctctagtgaaaaaccttgttggcataaaaaggctaattgattttcgagagtttcatactgtttttctgtaggccgtgtacctaaatgtacttttgctccatcgcgatgacttagtaaagcacatctaaaacttttagcgttattacgtaaaaaatcttgccagctttccccttctaaagggcaaaagtgagtatggtgcctatctaacatctcaatggctaaggcgtcgagcaaagcccgcttattttttacatgccaatacaatgtaggctgctctacacctagcttctgggcgagtttacgggttgttaaaccttcgattccgacctcattaagcagctctaatgcgctgttaatcactttacttttatctaatctggacatattcaccaccctgaattgactctcttccgggcgctatcatgccataccgcgaaaggttttgcgccattcgatggcgcgccgccattgcttgtgcaatgtacatcagagattttgagacacaaccaattattgaaggcctccctaacggggggcctttttttgtttctggtcccccgcttaacgatcgttggctgttttcagcaggacgcactgacctccctatcagtgatagagattgacatccctatcagtgatagagatactgagcacagctgtcaccggatgtgctttccggtctgatgagtccgtgaggacgaaacagcctctacaaataattttgtttaaatcacacgggtaaggaggtatttaaatgaaaacactgtcccaagcacagtcgaagacgagtagccagcagttttctttcaccggtaattctagcgctaacgtgattatcggcaaccagaaactaactatcaacgacgtcgcccgcgttgctcggaacgggaccttagtaagcctgactaacaacactgatatacttcaaggcattcaggcgtcctgtgattatatcaataacgcagttgagtctggtgaaccaatttacggtgtgacctcaggcttcggcggtatggcgaacgttgctatcagccgtgaacaggcctccgaactgcaatcgaatttggtatggcaccataaaactggtgctgggaacaaactccctttggcggacgtacgtgcagcaatgctgctgcgcgccaactcgcatatgcgtggcgcgtccggtatccgtctggagctgatcaaacgtatggaaatcttcttgaacgctggtgttactccgtacgtttatgaatttggatctatcggcgcttctggagatctggtcccgctgagctacattacgggttccctgattggccttgacccgagcttcaaggtggatttcaacggcaaagaaatggacgccccgaccgcgttacgccagttaaatctgtctcccctgacacttctgcctaaagaaggtctagctatggtaaatgggacctcagtcatgactggcatcgcagctaactgcgtatacgacacccagatcctgactgcgattgcaatgggtgttcacgctctggatatccaggccctgaacggcaccaaccagtctttccacccgtttatccataactctaagccgcacccaggtcagctgtgggcggctgatcagatgatatcattgctggctaactcgcaactggtacgggacgagctggacggcaaacatgattaccgcgaccacgagctgatccaggatcgttatagcctgcgttgccttccgcagtacctgggtccgattgtggacggtatctcacagatagcaaaacaaatcgaaattgaaattaactccgttactgataaccctctgattgacgtcgataaccaggcgtcgtaccacggcggaaatttcctgggtcagtatgttggcatgggtatggaccaccttcgctactatatcggcctgctggcgaaacacctggatgtgcagattgcgctgctagctagtcccgaatttagcaacggactgccgccatctttattgggcaaccgtgaacgtaaggttaacatgggtctgaaaggtttacaaatctgtggcaattccatcatgccgctgctgacgttctacggcaatagcatcgccgaccgctttccgacccatgcagagcaattcaaccagaatatcaactctcagggctacacctccgcaacgctggcgcgacgtagtgttgatatcttccaaaactacgttgcgattgccctgatgtttggcgtccaggctgtagacctgaggacttataaaaagactggccattacgatgcgcgtgcttgcctctctccggctaccgaacgcctgtattccgccgtgcgtcacgtagttggtcagaaacctacttcagatcgcccatacatctggaacgataacgagcagggtctggatgaacacatcgctcgcatctccgctgacattgccgctggcggagtaattgttcaagctgtacaggatatcctgccgtgcctgcactaaccggcttatcggtcagtttcacctgatttacgtaaaaacccgcttcggcgggtttttgcttttggaggggcagaaagatgaatgactgtccacgacgctatacccaaaagaaa

SEQ ID NO: 351 - DNA, 5122 bp, synthetic construct
  source 1..5122: mol_type = other DNA
aggctaggtggaggctcagtgatgataagtctgcgatggtggatgcatgtgtcatggtcatagctgtttcctgtgtgaaattgttatccgctcagagggcacaatcctattccgcgctatccgacaatctccaagacattaggtggagttcagttcggcgagcggaaatggcttacgaacggggcggagatttcctggaagatgccaggaagatacttaacagggaagtgagagggccgcggcaaagccgtttttccataggctccgcccccctgacaagcatcacgaaatctgacgctcaaatcagtggtggcgaaacccgacaggactataaagataccaggcgtttccccctggcggctccctcgtgcgctctcctgttcctgcctttcggtttaccggtgtcattccgctgttatggccgcgtttgtctcattccacgcctgacactcagttccgggtaggcagttcgctccaagctggactgtatgcacgaaccccccgttcagtccgaccgctgcgccttatccggtaactatcgtcttgagtccaacccggaaagacatgcaaaagcaccactggcagcagccactggtaattgatttagaggagttagtcttgaagtcatgcgccggttaaggctaaactgaaaggacaagttttggtgactgcgctcctccaagccagttacctcggttcaaagagttggtagctcagagaaccttcgaaaaaccgccctgcaaggcggttttttcgttttcagagcaagagattacgcgcagaccaaaacgatctcaagaagatcatcttattaagtctgacgctctattcaacaaagccgccgtccatgggtagggggcttcaaatcgtcctcgtgataccaattcggagcctgcttttttgtacaaacttgttgataatggcaattcaaggatcttcacctagatccttttaaattaaaaatgaagttttaaatcaatctaaagtatatatgagtaaacttggtctgacagttaccaatgcttaatcagtgaggcacctatctcagcgatctgtctatttcgttcatccatagttgcctgactccccgtcgtgtagataactacgatacgggagggcttaccatctggccccagtgctgcaatgataccgcgagagccacgctcaccggctccagatttatcagcaataaaccagccagccggaagggccgagcgcagaagtggtcctgcaactttatccgcctccatccagtctattaattgttgccgggaagctagagtaagtagttcgccagttaatagtttgcgcaacgttgttgccattgctacaggcatcgtggtgtcacgctcgtcgtttggtatggcttcattcagctccggttcccaacgatcaaggcgagttacatgatcccccatgttgtgcaaaaaagcggttagctccttcggtcctccgatcgttgtcagaagtaagttggccgcagtgttatcactcatggttatggcagcactgcataattctcttactgtcatgccatccgtaagatgcttttctgtgactggtgagtactcaaccaagtcattctgagaatagtgtatgcggcgaccgagttgctcttgcccggcgtcaatacgggataataccgcgccacatagcagaactttaaaagtgctcatcattggaaaacgttcttcggggcgaaaactctcaaggatcttaccgctgttgagatccagttcgatgtaacccactcgtgcacccaactgatcttcagcatcttttactttcaccagcgtttctgggtgagcaaaaacaggaaggcaaaatgccgcaaaaaagggaataagggcgacacggaaatgttgaatactcatactcttcctttttcaatattattgaagcatttatcagggttattgtctcatgagcggatacatatttgaatgtatttagaaaaataaacaaataggggttccgcgcacatttccccgaaaagtgccagatacctgaaacaaaacccatcgtacggccaaggaagtctccaataactgtgatccaccacaagcgccagggttttcccagtcacgacgttgtaaaacgacggccagtcatgcataatccgcacgcatctggaataaggaagtgccattccgcctgacctttgcctatgaggaccaaaacgaaaaaacaccctttcgggtgtcttttctggaatttggtaccgagaggctccatgattcagtatgacttgcctttggtcgaaaaaaaaagcccgcactgtcaggtgcgggcttttttctgtgtttccttattaggacccactttcacatttaagttgtttttctaatccgcatatgatcaattcaaggccgaataagaaggctggctctgcaccttggtgatcaaataattcgatagcttgtcgtaataatggcggcatactatcagtagtaggtgtttccctttcttctttagcgacttgatgctcttgatcttccaatacgcaacctaaagtaaaatgccccacagcgctgagtgcatataatgcattctctagtgaaaaaccttgttggcataaaaaggctaattgattttcgagagtttcatactgtttttctgtaggccgtgtacctaaatgtacttttgctccatcgcgatgacttagtaaagcacatctaaaacttttagcgttattacgtaaaaaatcttgccagctttccccttctaaagggcaaaagtgagtatggtgcctatctaacatctcaatggctaaggcgtcgagcaaagcccgcttattttttacatgccaatacaatgtaggctgctctacacctagcttctgggcgagtttacgggttgttaaaccttcgattccgacctcattaagcagctctaatgcgctgttaatcactttacttttatctaatctggacatattcaccaccctgaattgactctcttccgggcgctatcatgccataccgcgaaaggttttgcgccattcgatggcgcgccgccattgcttgtgcaatgtacatcagagattttgagacacaaccaattattgaaggcctccctaacggggggcctttttttgtttctggtcccccgcttaacgatcgttggctgttttcagcaggacgcactgacctccctatcagtgatagagattgacatccctatcagtgatagagatactgagcacagctgtcaccggatgtgctttccggtctgatgagtccgtgaggacgaaacagcctctacaaataattttgtttaaatcacacgggtaaggaggtatttaaatgaaaacactgtcccaagcacagtcgaagacgagtagccagcagttttctttcaccggtaattctagcgctaacgtgattatcggcaaccagaaactaactatcaacgacgtcgcccgcgttgctcggaacgggaccttagtaagcctgactaacaacactgatatacttcaaggcattcaggcgtcctgtgattatatcaataacgcagttgagtctggtgaaccaatttacggtgtgacctcaggcttcggcggtatggcgaacgttgctatcagccgtgaacaggcctccgaactgcaaaccaatgcggtatggtttatgaaaactggtgctgggaacaaactccctttggcggacgtacgtgcagcaatgctgctgcgcgccaactcgcatatgcgtggcgcgtccggtatccgtctggagctgatcaaacgtatggaaatcttcttgaacgctggtgttactccgtacgtttatgaatttggatctatcggcgcttctggagatctggtcccgctgagctacattacgggttccctgattggccttgacccgagcttcaaggtggatttcaacggcaaagaaatggacgccccgaccgcgttacgccagttaaatctgtctcccctgacacttctgcctaaagaagcgctagctatgatgaatgggacctcagtcatgactggcatcgcagctaactgcgtatacgacacccagatcctgactgcgattgcaatgggtgttcacgctctggatatccaggccctgaacggcaccaaccagtctttccacccgtttatccataactctaagccgcacccaggtcagctgtgggcggctgatcagatgatatcattgctggctaactcgcaactggtacgggacgagctggacggcaaacatgattaccgcgaccacgagctgatccaggatcgttatagcctgcgttgccttccgcagtacctgggtccgattgtggacggtatctcacagatagcaaaacaaatcgaaattgaaattaactccgttactgataaccctctgattgacgtcgataaccaggcgtcgtaccacggcggaaatttcctgggtcagtatgttggcatgggtatggaccaccttcgctactatatcggcctgctggcgaaacacctggatgtgcagattgcgctgctagctagtcccgaatttagcaacggactgccgccatctttattgggcaaccgtgaacgtaaggttaacatgggtctgaaaggtttacaaatctgtggcaattccatcatgccgctgctgacgttctacggcaatagcatcgccgaccgctttccgacccatgcagagcaattcaaccagaatatcaactctcagggctacacctccgcaacgctggcgcgacgtagtgttgatatcttccaaaactacgttgcgattgccctgatgtttggcgtccaggctgtagacctgaggacttataaaaagactggccattacgatgcgcgtgcttgcctctctccggctaccgaacgcctgtattccgccgtgcgtcacgtagttggtcagaaacctacttcagatcgcccatacatctggaacgataacgagcagggtctggatgaacacatcgctcgcatctccgctgacattgccgctggcggagtaattgttcaagctgtacaggatatcctgccgtgcctgcactaaccggcttatcggtcagtttcacctgatttacgtaaaaacccgcttcggcgggtttttgcttttggaggggcagaaagatgaatgactgtccacgacgctatacccaaaagaaa

SEQ ID NO: 352 - DNA, 5122 bp, synthetic construct
  source 1..5122: mol_type = other DNA
aggctaggtggaggctcagtgatgataagtctgcgatggtggatgcatgtgtcatggtcatagctgtttcctgtgtgaaattgttatccgctcagagggcacaatcctattccgcgctatccgacaatctccaagacattaggtggagttcagttcggcgagcggaaatggcttacgaacggggcggagatttcctggaagatgccaggaagatacttaacagggaagtgagagggccgcggcaaagccgtttttccataggctccgcccccctgacaagcatcacgaaatctgacgctcaaatcagtggtggcgaaacccgacaggactataaagataccaggcgtttccccctggcggctccctcgtgcgctctcctgttcctgcctttcggtttaccggtgtcattccgctgttatggccgcgtttgtctcattccacgcctgacactcagttccgggtaggcagttcgctccaagctggactgtatgcacgaaccccccgttcagtccgaccgctgcgccttatccggtaactatcgtcttgagtccaacccggaaagacatgcaaaagcaccactggcagcagccactggtaattgatttagaggagttagtcttgaagtcatgcgccggttaaggctaaactgaaaggacaagttttggtgactgcgctcctccaagccagttacctcggttcaaagagttggtagctcagagaaccttcgaaaaaccgccctgcaaggcggttttttcgttttcagagcaagagattacgcgcagaccaaaacgatctcaagaagatcatcttattaagtctgacgctctattcaacaaagccgccgtccatgggtagggggcttcaaatcgtcctcgtgataccaattcggagcctgcttttttgtacaaacttgttgataatggcaattcaaggatcttcacctagatccttttaaattaaaaatgaagttttaaatcaatctaaagtatatatgagtaaacttggtctgacagttaccaatgcttaatcagtgaggcacctatctcagcgatctgtctatttcgttcatccatagttgcctgactccccgtcgtgtagataactacgatacgggagggcttaccatctggccccagtgctgcaatgataccgcgagagccacgctcaccggctccagatttatcagcaataaaccagccagccggaagggccgagcgcagaagtggtcctgcaactttatccgcctccatccagtctattaattgttgccgggaagctagagtaagtagttcgccagttaatagtttgcgcaacgttgttgccattgctacaggcatcgtggtgtcacgctcgtcgtttggtatggcttcattcagctccggttcccaacgatcaaggcgagttacatgatcccccatgttgtgcaaaaaagcggttagctccttcggtcctccgatcgttgtcagaagtaagttggccgcagtgttatcactcatggttatggcagcactgcataattctcttactgtcatgccatccgtaagatgcttttctgtgactggtgagtactcaaccaagtcattctgagaatagtgtatgcggcgaccgagttgctcttgcccggcgtcaatacgggataataccgcgccacatagcagaactttaaaagtgctcatcattggaaaacgttcttcggggcgaaaactctcaaggatcttaccgctgttgagatccagttcgatgtaacccactcgtgcacccaactgatcttcagcatcttttactttcaccagcgtttctgggtgagcaaaaacaggaaggcaaaatgccgcaaaaaagggaataagggcgacacggaaatgttgaatactcatactcttcctttttcaatattattgaagcatttatcagggttattgtctcatgagcggatacatatttgaatgtatttagaaaaataaacaaataggggttccgcgcacatttccccgaaaagtgccagatacctgaaacaaaacccatcgtacggccaaggaagtctccaataactgtgatccaccacaagcgccagggttttcccagtcacgacgttgtaaaacgacggccagtcatgcataatccgcacgcatctggaataaggaagtgccattccgcctgacctttgcctatgaggaccaaaacgaaaaaacaccctttcgggtgtcttttctggaatttggtaccgagaggctccatgattcagtatgacttgcctttggtcgaaaaaaaaagcccgcactgtcaggtgcgggcttttttctgtgtttccttattaggacccactttcacatttaagttgtttttctaatccgcatatgatcaattcaaggccgaataagaaggctggctctgcaccttggtgatcaaataattcgatagcttgtcgtaataatggcggcatactatcagtagtaggtgtttccctttcttctttagcgacttgatgctcttgatcttccaatacgcaacctaaagtaaaatgccccacagcgctgagtgcatataatgcattctctagtgaaaaaccttgttggcataaaaaggctaattgattttcgagagtttcatactgtttttctgtaggccgtgtacctaaatgtacttttgctccatcgcgatgacttagtaaagcacatctaaaacttttagcgttattacgtaaaaaatcttgccagctttccccttctaaagggcaaaagtgagtatggtgcctatctaacatctcaatggctaaggcgtcgagcaaagcccgcttattttttacatgccaatacaatgtaggctgctctacacctagcttctgggcgagtttacgggttgttaaaccttcgattccgacctcattaagcagctctaatgcgctgttaatcactttacttttatctaatctggacatattcaccaccctgaattgactctcttccgggcgctatcatgccataccgcgaaaggttttgcgccattcgatggcgcgccgccattgcttgtgcaatgtacatcagagattttgagacacaaccaattattgaaggcctccctaacggggggcctttttttgtttctggtcccccgcttaacgatcgttggctgttttcagcaggacgcactgacctccctatcagtgatagagattgacatccctatcagtgatagagatactgagcacagctgtcaccggatgtgctttccggtctgatgagtccgtgaggacgaaacagcctctacaaataattttgtttaaatcacacgggtaaggaggtatttaaatgaaaacactgtcccaagcacagtcgaagacgagtagccagcagttttctttcaccggtaattctagcgctaacgtgattatcggcaaccagaaactaactatcaacgacgtcgcccgcgttgctcggaacgggaccttagtaagcctgactaacaacactgatatacttcaaggcattcaggcgtcctgtgattatatcaataacgcagttgagtctggtgaaccaatttacggtgtgacctcaggcttcggcggtatggcgaacgttgctatcagccgtgaacaggcctccgaactgcaaaccaatgtcgtatggtttatgaaaactggtgctgggaacaaactccctttggcggacgtacgtgcagcaatgctgctgcgcgccaactcgcatatgcgtggcgcgtccggtatccgtctggagctgatcaaacgtatggaaatcttcttgaacgctggtgttactccgtacgtttatgaatttggatctatcggcgcttctggagatctggtcccgctgagctacattacgggttccctgattggccttgacccgagcttcaaggtggatttcaacggcaaagaaatggacgccccgaccgcgttacgccagttaaatctgtctcccctgacacttctgcctaaagaaggtctagctatgatgaatgggacctcagtcatgactggcatcgcagctaactgcgtatacgacacccagatcctgactgcgattgcaatgggtgttcacgctctggatatccaggccctgaacggcaccaaccagtctttccacccgtttatccataactctaagccgcacccaggtcagctgtgggcggctgatcagatgatatcattgctggctaactcgcaactggtacgggacgagctggacggcaaacatgattaccgcgaccacgagctgatccaggatcgttatagcctgcgttgccttccgcagtacctgggtccgattgtggacggtatctcacagatagcaaaacaaatcgaaattgaaattaactccgttactgataaccctctgattgacgtcgataaccaggcgtcgtaccacggcggaaatttcctgggtcagtatgttggcatgggtatggaccaccttcgctactatatcggcctgctggcgaaacacctggatgtgcagattgcgctgctagctagtcccgaatttagcaacggactgccgccatctttattgggcaaccgtgaacgtaaggttaacatgggtctgaaaggtttacaaatctgtggcaattccatcatgccgctgctgacgttctacggcaatagcatcgccgaccgctttccgacccatgcagagcaattcaaccagaatatcaactctcagggctacacctccgcaacgctggcgcgacgtagtgttgatatcttccaaaactacgttgcgattgccctgatgtttggcgtccaggctgtagacctgaggacttataaaaagactggccattacgatgcgcgtgcttgcctctctccggctaccgaacgcctgtattccgccgtgcgtcacgtagttggtcagaaacctacttcagatcgcccatacatctggaacgataacgagcagggtctggatgaacacatcgctcgcatctccgctgacattgccgctggcggagtaattgttcaagctgtacaggatatcctgccgtgcctgcactaaccggcttatcggtcagtttcacctgatttacgtaaaaacccgcttcggcgggtttttgcttttggaggggcagaaagatgaatgactgtccacgacgctatacccaaaagaaa

SEQ ID NO: 353 - DNA, 5122 bp, synthetic construct
  source 1..5122: mol_type = other DNA
aggctaggtggaggctcagtgatgataagtctgcgatggtggatgcatgtgtcatggtcatagctgtttcctgtgtgaaattgttatccgctcagagggcacaatcctattccgcgctatccgacaatctccaagacattaggtggagttcagttcggcgagcggaaatggcttacgaacggggcggagatttcctggaagatgccaggaagatacttaacagggaagtgagagggccgcggcaaagccgtttttccataggctccgcccccctgacaagcatcacgaaatctgacgctcaaatcagtggtggcgaaacccgacaggactataaagataccaggcgtttccccctggcggctccctcgtgcgctctcctgttcctgcctttcggtttaccggtgtcattccgctgttatggccgcgtttgtctcattccacgcctgacactcagttccgggtaggcagttcgctccaagctggactgtatgcacgaaccccccgttcagtccgaccgctgcgccttatccggtaactatcgtcttgagtccaacccggaaagacatgcaaaagcaccactggcagcagccactggtaattgatttagaggagttagtcttgaagtcatgcgccggttaaggctaaactgaaaggacaagttttggtgactgcgctcctccaagccagttacctcggttcaaagagttggtagctcagagaaccttcgaaaaaccgccctgcaaggcggttttttcgttttcagagcaagagattacgcgcagaccaaaacgatctcaagaagatcatcttattaagtctgacgctctattcaacaaagccgccgtccatgggtagggggcttcaaatcgtcctcgtgataccaattcggagcctgcttttttgtacaaacttgttgataatggcaattcaaggatcttcacctagatccttttaaattaaaaatgaagttttaaatcaatctaaagtatatatgagtaaacttggtctgacagttaccaatgcttaatcagtgaggcacctatctcagcgatctgtctatttcgttcatccatagttgcctgactccccgtcgtgtagataactacgatacgggagggcttaccatctggccccagtgctgcaatgataccgcgagagccacgctcaccggctccagatttatcagcaataaaccagccagccggaagggccgagcgcagaagtggtcctgcaactttatccgcctccatccagtctattaattgttgccgggaagctagagtaagtagttcgccagttaatagtttgcgcaacgttgttgccattgctacaggcatcgtggtgtcacgctcgtcgtttggtatggcttcattcagctccggttcccaacgatcaaggcgagttacatgatcccccatgttgtgcaaaaaagcggttagctccttcggtcctccgatcgttgtcagaagtaagttggccgcagtgttatcactcatggttatggcagcactgcataattctcttactgtcatgccatccgtaagatgcttttctgtgactggtgagtactcaaccaagtcattctgagaatagtgtatgcggcgaccgagttgctcttgcccggcgtcaatacgggataataccgcgccacatagcagaactttaaaagtgctcatcattggaaaacgttcttcggggcgaaaactctcaaggatcttaccgctgttgagatccagttcgatgtaacccactcgtgcacccaactgatcttcagcatcttttactttcaccagcgtttctgggtgagcaaaaacaggaaggcaaaatgccgcaaaaaagggaataagggcgacacggaaatgttgaatactcatactcttcctttttcaatattattgaagcatttatcagggttattgtctcatgagcggatacatatttgaatgtatttagaaaaataaacaaataggggttccgcgcacatttccccgaaaagtgccagatacctgaaacaaaacccatcgtacggccaaggaagtctccaataactgtgatccaccacaagcgccagggttttcccagtcacgacgttgtaaaacgacggccagtcatgcataatccgcacgcatctggaataaggaagtgccattccgcctgacctttgcctatgaggaccaaaacgaaaaaacaccctttcgggtgtcttttctggaatttggtaccgagaggctccatgattcagtatgacttgcctttggtcgaaaaaaaaagcccgcactgtcaggtgcgggcttttttctgtgtttccttattaggacccactttcacatttaagttgtttttctaatccgcatatgatcaattcaaggccgaataagaaggctggctctgcaccttggtgatcaaataattcgatagcttgtcgtaataatggcggcatactatcagtagtaggtgtttccctttcttctttagcgacttgatgctcttgatcttccaatacgcaacctaaagtaaaatgccccacagcgctgagtgcatataatgcattctctagtgaaaaaccttgttggcataaaaaggctaattgattttcgagagtttcatactgtttttctgtaggccgtgtacctaaatgtacttttgctccatcgcgatgacttagtaaagcacatctaaaacttttagcgttattacgtaaaaaatcttgccagctttccccttctaaagggcaaaagtgagtatggtgcctatctaacatctcaatggctaaggcgtcgagcaaagcccgcttattttttacatgccaatacaatgtaggctgctctacacctagcttctgggcgagtttacgggttgttaaaccttcgattccgacctcattaagcagctctaatgcgctgttaatcactttacttttatctaatctggacatattcaccaccctgaattgactctcttccgggcgctatcatgccataccgcgaaaggttttgcgccattcgatggcgcgccgccattgcttgtgcaatgtacatcagagattttgagacacaaccaattattgaaggcctccctaacggggggcctttttttgtttctggtcccccgcttaacgatcgttggctgttttcagcaggacgcactgacctccctatcagtgatagagattgacatccctatcagtgatagagatactgagcacagctgtcaccggatgtgctttccggtctgatgagtccgtgaggacgaaacagcctctacaaataattttgtttaaatcacacgggtaaggaggtatttaaatgaaaacactgtcccaagcacagtcgaagacgagtagccagcagttttctttcaccggtaattctagcgctaacgtgattatcggcaaccagaaactaactatcaacgacgtcgcccgcgttgctcggaacgggaccttagtaagcctgactaacaacactgatatacttcaaggcattcaggcgtcctgtgattatatcaataacgcagttgagtctggtgaaccaatttacggtgtgacctcaggcttcggcggtatggcgaacgttgctatcagccgtgaacaggcctccgaactgcaacacaatatggtatggtttcataaaactggtgctgggaacaaactccctttggcggacgtacgtgcagcaatgctgctgcgcgccaactcgcatatgcgtggcgcgtccggtatccgtctggagctgatcaaacgtatggaaatcttcttgaacgctggtgttactccgtacgtttatgaatttggatctatcggcgcttctggagatctggtcccgctgagctacattacgggttccctgattggccttgacccgagcttcaaggtggatttcaacggcaaagaaatggacgccccgaccgcgttacgccagttaaatctgtctcccctgacacttctgcctaaagaagccattgctatgttaaatgggacctcagtcatgactggcatcgcagctaactgcgtatacgacacccagatcctgactgcgattgcaatgggtgttcacgctctggatatccaggccctgaacggcaccaaccagtctttccacccgtttatccataactctaagccgcacccaggtcagctgtgggcggctgatcagatgatatcattgctggctaactcgcaactggtacgggacgagctggacggcaaacatgattaccgcgaccacgagctgatccaggatcgttatagcctgcgttgccttccgcagtacctgggtccgattgtggacggtatctcacagatagcaaaacaaatcgaaattgaaattaactccgttactgataaccctctgattgacgtcgataaccaggcgtcgtaccacggcggaaatttcctgggtcagtatgttggcatgggtatggaccaccttcgctactatatcggcctgctggcgaaacacctggatgtgcagattgcgctgctagctagtcccgaatttagcaacggactgccgccatctttattgggcaaccgtgaacgtaaggttaacatgggtctgaaaggtttacaaatctgtggcaattccatcatgccgctgctgacgttctacggcaatagcatcgccgaccgctttccgacccatgcagagcaattcaaccagaatatcaactctcagggctacacctccgcaacgctggcgcgacgtagtgttgatatcttccaaaactacgttgcgattgccctgatgtttggcgtccaggctgtagacctgaggacttataaaaagactggccattacgatgcgcgtgcttgcctctctccggctaccgaacgcctgtattccgccgtgcgtcacgtagttggtcagaaacctacttcagatcgcccatacatctggaacgataacgagcagggtctggatgaacacatcgctcgcatctccgctgacattgccgctggcggagtaattgttcaagctgtacaggatatcctgccgtgcctgcactaaccggcttatcggtcagtttcacctgatttacgtaaaaacccgcttcggcgggtttttgcttttggaggggcagaaagatgaatgactgtccacgacgctatacccaaaagaaa

SEQ ID NO: 354 - DNA, 5122 bp, synthetic construct
  source 1..5122: mol_type = other DNA
aggctaggtggaggctcagtgatgataagtctgcgatggtggatgcatgtgtcatggtcatagctgtttcctgtgtgaaattgttatccgctcagagggcacaatcctattccgcgctatccgacaatctccaagacattaggtggagttcagttcggcgagcggaaatggcttacgaacggggcggagatttcctggaagatgccaggaagatacttaacagggaagtgagagggccgcggcaaagccgtttttccataggctccgcccccctgacaagcatcacgaaatctgacgctcaaatcagtggtggcgaaacccgacaggactataaagataccaggcgtttccccctggcggctccctcgtgcgctctcctgttcctgcctttcggtttaccggtgtcattccgctgttatggccgcgtttgtctcattccacgcctgacactcagttccgggtaggcagttcgctccaagctggactgtatgcacgaaccccccgttcagtccgaccgctgcgccttatccggtaactatcgtcttgagtccaacccggaaagacatgcaaaagcaccactggcagcagccactggtaattgatttagaggagttagtcttgaagtcatgcgccggttaaggctaaactgaaaggacaagttttggtgactgcgctcctccaagccagttacctcggttcaaagagttggtagctcagagaaccttcgaaaaaccgccctgcaaggcggttttttcgttttcagagcaagagattacgcgcagaccaaaacgatctcaagaagatcatcttattaagtctgacgctctattcaacaaagccgccgtccatgggtagggggcttcaaatcgtcctcgtgataccaattcggagcctgcttttttgtacaaacttgttgataatggcaattcaaggatcttcacctagatccttttaaattaaaaatgaagttttaaatcaatctaaagtatatatgagtaaacttggtctgacagttaccaatgcttaatcagtgaggcacctatctcagcgatctgtctatttcgttcatccatagttgcctgactccccgtcgtgtagataactacgatacgggagggcttaccatctggccccagtgctgcaatgataccgcgagagccacgctcaccggctccagatttatcagcaataaaccagccagccggaagggccgagcgcagaagtggtcctgcaactttatccgcctccatccagtctattaattgttgccgggaagctagagtaagtagttcgccagttaatagtttgcgcaacgttgttgccattgctacaggcatcgtggtgtcacgctcgtcgtttggtatggcttcattcagctccggttcccaacgatcaaggcgagttacatgatcccccatgttgtgcaaaaaagcggttagctccttcggtcctccgatcgttgtcagaagtaagttggccgcagtgttatcactcatggttatggcagcactgcataattctcttactgtcatgccatccgtaagatgcttttctgtgactggtgagtactcaaccaagtcattctgagaatagtgtatgcggcgaccgagttgctcttgcccggcgtcaatacgggataataccgcgccacatagcagaactttaaaagtgctcatcattggaaaacgttcttcggggcgaaaactctcaaggatcttaccgctgttgagatccagttcgatgtaacccactcgtgcacccaactgatcttcagcatcttttactttcaccagcgtttctgggtgagcaaaaacaggaaggcaaaatgccgcaaaaaagggaataagggcgacacggaaatgttgaatactcatactcttcctttttcaatattattgaagcatttatcagggttattgtctcatgagcggatacatatttgaatgtatttagaaaaataaacaaataggggttccgcgcacatttccccgaaaagtgccagatacctgaaacaaaacccatcgtacggccaaggaagtctccaataactgtgatccaccacaagcgccagggttttcccagtcacgacgttgtaaaacgacggccagtcatgcataatccgcacgcatctggaataaggaagtgccattccgcctgacctttgcctatgaggaccaaaacgaaaaaacaccctttcgggtgtcttttctggaatttggtaccgagaggctccatgattcagtatgacttgcctttggtcgaaaaaaaaagcccgcactgtcaggtgcgggcttttttctgtgtttccttattaggacccactttcacatttaagttgtttttctaatccgcatatgatcaattcaaggccgaataagaaggctggctctgcaccttggtgatcaaataattcgatagcttgtcgtaataatggcggcatactatcagtagtaggtgtttccctttcttctttagcgacttgatgctcttgatcttccaatacgcaacctaaagtaaaatgccccacagcgctgagtgcatataatgcattctctagtgaaaaaccttgttggcataaaaaggctaattgattttcgagagtttcatactgtttttctgtaggccgtgtacctaaatgtacttttgctccatcgcgatgacttagtaaagcacatctaaaacttttagcgttattacgtaaaaaatcttgccagctttccccttctaaagggcaaaagtgagtatggtgcctatctaacatctcaatggctaaggcgtcgagcaaagcccgcttattttttacatgccaatacaatgtaggctgctctacacctagcttctgggcgagtttacgggttgttaaaccttcgattccgacctcattaagcagctctaatgcgctgttaatcactttacttttatctaatctggacatattcaccaccctgaattgactctcttccgggcgctatcatgccataccgcgaaaggttttgcgccattcgatggcgcgccgccattgcttgtgcaatgtacatcagagattttgagacacaaccaattattgaaggcctccctaacggggggcctttttttgtttctggtcccccgcttaacgatcgttggctgttttcagcaggacgcactgacctccctatcagtgatagagattgacatccctatcagtgatagagatactgagcacagctgtcaccggatgtgctttccggtctgatgagtccgtgaggacgaaacagcctctacaaataattttgtttaaatcacacgggtaaggaggtatttaaatgaaaacactgtcccaagcacagtcgaagacgagtagccagcagttttctttcaccggtaattctagcgctaacgtgattatcggcaaccagaaactaactatcaacgacgtcgcccgcgttgctcggaacgggaccttagtaagcctgactaacaacactgatatacttcaaggcattcaggcgtcctgtgattatatcaataacgcagttgagtctggtgaaccaatttacggtgtgacctcaggcttcggcggtatggcgaacgttgctatcagccgtgaacaggcctccgaactgcaacacaatttggtatggtttatgaaaactggtgctgggaacaaactccctttggcggacgtacgtgcagcaatgctgctgcgcgccaactcgcatatgcgtggcgcgtccggtatccgtctggagctgatcaaacgtatggaaatcttcttgaacgctggtgttactccgtacgtttatgaatttggatctatcggcgcttctggagatctggtcccgctgagctacattacgggttccctgattggccttgacccgagcttcaaggtggatttcaacggcaaagaaatggacgccccgaccgcgttacgccagttaaatctgtctcccctgacacttctgcctaaagaagccctagctatgaccaatgggacctcagtcatgactggcatcgcagctaactgcgtatacgacacccagatcctgactgcgattgcaatgggtgttcacgctctggatatccaggccctgaacggcaccaaccagtctttccacccgtttatccataactctaagccgcacccaggtcagctgtgggcggctgatcagatgatatcattgctggctaactcgcaactggtacgggacgagctggacggcaaacatgattaccgcgaccacgagctgatccaggatcgttatagcctgcgttgccttccgcagtacctgggtccgattgtggacggtatctcacagatagcaaaacaaatcgaaattgaaattaactccgttactgataaccctctgattgacgtcgataaccaggcgtcgtaccacggcggaaatttcctgggtcagtatgttggcatgggtatggaccaccttcgctactatatcggcctgctggcgaaacacctggatgtgcagattgcgctgctagctagtcccgaatttagcaacggactgccgccatctttattgggcaaccgtgaacgtaaggttaacatgggtctgaaaggtttacaaatctgtggcaattccatcatgccgctgctgacgttctacggcaatagcatcgccgaccgctttccgacccatgcagagcaattcaaccagaatatcaactctcagggctacacctccgcaacgctggcgcgacgtagtgttgatatcttccaaaactacgttgcgattgccctgatgtttggcgtccaggctgtagacctgaggacttataaaaagactggccattacgatgcgcgtgcttgcctctctccggctaccgaacgcctgtattccgccgtgcgtcacgtagttggtcagaaacctacttcagatcgcccatacatctggaacgataacgagcagggtctggatgaacacatcgctcgcatctccgctgacattgccgctggcggagtaattgttcaagctgtacaggatatcctgccgtgcctgcactaaccggcttatcggtcagtttcacctgatttacgtaaaaacccgcttcggcgggtttttgcttttggaggggcagaaagatgaatgactgtccacgacgctatacccaaaagaaa

SEQ ID NO: 355 - DNA, 5122 bp, synthetic construct
  source 1..5122: mol_type = other DNA
aggctaggtggaggctcagtgatgataagtctgcgatggtggatgcatgtgtcatggtcatagctgtttcctgtgtgaaattgttatccgctcagagggcacaatcctattccgcgctatccgacaatctccaagacattaggtggagttcagttcggcgagcggaaatggcttacgaacggggcggagatttcctggaagatgccaggaagatacttaacagggaagtgagagggccgcggcaaagccgtttttccataggctccgcccccctgacaagcatcacgaaatctgacgctcaaatcagtggtggcgaaacccgacaggactataaagataccaggcgtttccccctggcggctccctcgtgcgctctcctgttcctgcctttcggtttaccggtgtcattccgctgttatggccgcgtttgtctcattccacgcctgacactcagttccgggtaggcagttcgctccaagctggactgtatgcacgaaccccccgttcagtccgaccgctgcgccttatccggtaactatcgtcttgagtccaacccggaaagacatgcaaaagcaccactggcagcagccactggtaattgatttagaggagttagtcttgaagtcatgcgccggttaaggctaaactgaaaggacaagttttggtgactgcgctcctccaagccagttacctcggttcaaagagttggtagctcagagaaccttcgaaaaaccgccctgcaaggcggttttttcgttttcagagcaagagattacgcgcagaccaaaacgatctcaagaagatcatcttattaagtctgacgctctattcaacaaagccgccgtccatgggtagggggcttcaaatcgtcctcgtgataccaattcggagcctgcttttttgtacaaacttgttgataatggcaattcaaggatcttcacctagatccttttaaattaaaaatgaagttttaaatcaatctaaagtatatatgagtaaacttggtctgacagttaccaatgcttaatcagtgaggcacctatctcagcgatctgtctatttcgttcatccatagttgcctgactccccgtcgtgtagataactacgatacgggagggcttaccatctggccccagtgctgcaatgataccgcgagagccacgctcaccggctccagatttatcagcaataaaccagccagccggaagggccgagcgcagaagtggtcctgcaactttatccgcctccatccagtctattaattgttgccgggaagctagagtaagtagttcgccagttaatagtttgcgcaacgttgttgccattgctacaggcatcgtggtgtcacgctcgtcgtttggtatggcttcattcagctccggttcccaacgatcaaggcgagttacatgatcccccatgttgtgcaaaaaagcggttagctccttcggtcctccgatcgttgtcagaagtaagttggccgcagtgttatcactcatggttatggcagcactgcataattctcttactgtcatgccatccgtaagatgcttttctgtgactggtgagtactcaaccaagtcattctgagaatagtgtatgcggcgaccgagttgctcttgcccggcgtcaatacgggataataccgcgccacatagcagaactttaaaagtgctcatcattggaaaacgttcttcggggcgaaaactctcaaggatcttaccgctgttgagatccagttcgatgtaacccactcgtgcacccaactgatcttcagcatcttttactttcaccagcgtttctgggtgagcaaaaacaggaaggcaaaatgccgcaaaaaagggaataagggcgacacggaaatgttgaatactcatactcttcctttttcaatattattgaagcatttatcagggttattgtctcatgagcggatacatatttgaatgtatttagaaaaataaacaaataggggttccgcgcacatttccccgaaaagtgccagatacctgaaacaaaacccatcgtacggccaaggaagtctccaataactgtgatccaccacaagcgccagggttttcccagtcacgacgttgtaaaacgacggccagtcatgcataatccgcacgcatctggaataaggaagtgccattccgcctgacctttgcctatgaggaccaaaacgaaaaaacaccctttcgggtgtcttttctggaatttggtaccgagaggctccatgattcagtatgacttgcctttggtcgaaaaaaaaagcccgcactgtcaggtgcgggcttttttctgtgtttccttattaggacccactttcacatttaagttgtttttctaatccgcatatgatcaattcaaggccgaataagaaggctggctctgcaccttggtgatcaaataattcgatagcttgtcgtaataatggcggcatactatcagtagtaggtgtttccctttcttctttagcgacttgatgctcttgatcttccaatacgcaacctaaagtaaaatgccccacagcgctgagtgcatataatgcattctctagtgaaaaaccttgttggcataaaaaggctaattgattttcgagagtttcatactgtttttctgtaggccgtgtacctaaatgtacttttgctccatcgcgatgacttagtaaagcacatctaaaacttttagcgttattacgtaaaaaatcttgccagctttccccttctaaagggcaaaagtgagtatggtgcctatctaacatctcaatggctaaggcgtcgagcaaagcccgcttattttttacatgccaatacaatgtaggctgctctacacctagcttctgggcgagtttacgggttgttaaaccttcgattccgacctcattaagcagctctaatgcgctgttaatcactttacttttatctaatctggacatattcaccaccctgaattgactctcttccgggcgctatcatgccataccgcgaaaggttttgcgccattcgatggcgcgccgccattgcttgtgcaatgtacatcagagattttgagacacaaccaattattgaaggcctccctaacggggggcctttttttgtttctggtcccccgcttaacgatcgttggctgttttcagcaggacgcactgacctccctatcagtgatagagattgacatccctatcagtgatagagatactgagcacagctgtcaccggatgtgctttccggtctgatgagtccgtgaggacgaaacagcctctacaaataattttgtttaaatcacacgggtaaggaggtatttaaatgaaaacactgtcccaagcacagtcgaagacgagtagccagcagttttctttcaccggtaattctagcgctaacgtgattatcggcaaccagaaactaactatcaacgacgtcgcccgcgttgctcggaacgggaccttagtaagcctgactaacaacactgatatacttcaaggcattcaggcgtcctgtgattatatcaataacgcagttgagtctggtgaaccaatttacggtgtgacctcaggcttcggcggtatggcgaacgttgctatcagccgtgaacaggcctccgaactgcaacacaatattgtatggcatctgaaaactggtgctgggaacaaactccctttggcggacgtacgtgcagcaatgctgctgcgcgccaactcgcatatgcgtggcgcgtccggtatccgtctggagctgatcaaacgtatggaaatcttcttgaacgctggtgttactccgtacgtttatgaatttggatctatcggcgcttctggagatctggtcccgctgagctacattacgggttccctgattggccttgacccgagcttcaaggtggatttcaacggcaaagaaatggacgccccgaccgcgttacgccagttaaatctgtctcccctgacacttctgcctaaagaaggtctagctatgattaatgggacctcagtcatgactggcatcgcagctaactgcgtatacgacacccagatcctgactgcgattgcaatgggtgttcacgctctggatatccaggccctgaacggcaccaaccagtctttccacccgtttatccataactctaagccgcacccaggtcagctgtgggcggctgatcagatgatatcattgctggctaactcgcaactggtacgggacgagctggacggcaaacatgattaccgcgaccacgagctgatccaggatcgttatagcctgcgttgccttccgcagtacctgggtccgattgtggacggtatctcacagatagcaaaacaaatcgaaattgaaattaactccgttactgataaccctctgattgacgtcgataaccaggcgtcgtaccacggcggaaatttcctgggtcagtatgttggcatgggtatggaccaccttcgctactatatcggcctgctggcgaaacacctggatgtgcagattgcgctgctagctagtcccgaatttagcaacggactgccgccatctttattgggcaaccgtgaacgtaaggttaacatgggtctgaaaggtttacaaatctgtggcaattccatcatgccgctgctgacgttctacggcaatagcatcgccgaccgctttccgacccatgcagagcaattcaaccagaatatcaactctcagggctacacctccgcaacgctggcgcgacgtagtgttgatatcttccaaaactacgttgcgattgccctgatgtttggcgtccaggctgtagacctgaggacttataaaaagactggccattacgatgcgcgtgcttgcctctctccggctaccgaacgcctgtattccgccgtgcgtcacgtagttggtcagaaacctacttcagatcgcccatacatctggaacgataacgagcagggtctggatgaacacatcgctcgcatctccgctgacattgccgctggcggagtaattgttcaagctgtacaggatatcctgccgtgcctgcactaaccggcttatcggtcagtttcacctgatttacgtaaaaacccgcttcggcgggtttttgcttttggaggggcagaaagatgaatgactgtccacgacgctatacccaaaagaaa

SEQ ID NO: 356 - DNA, 5122 bp, synthetic construct
  source 1..5122: mol_type = other DNA
aggctaggtggaggctcagtgatgataagtctgcgatggtggatgcatgtgtcatggtcatagctgtttcctgtgtgaaattgttatccgctcagagggcacaatcctattccgcgctatccgacaatctccaagacattaggtggagttcagttcggcgagcggaaatggcttacgaacggggcggagatttcctggaagatgccaggaagatacttaacagggaagtgagagggccgcggcaaagccgtttttccataggctccgcccccctgacaagcatcacgaaatctgacgctcaaatcagtggtggcgaaacccgacaggactataaagataccaggcgtttccccctggcggctccctcgtgcgctctcctgttcctgcctttcggtttaccggtgtcattccgctgttatggccgcgtttgtctcattccacgcctgacactcagttccgggtaggcagttcgctccaagctggactgtatgcacgaaccccccgttcagtccgaccgctgcgccttatccggtaactatcgtcttgagtccaacccggaaagacatgcaaaagcaccactggcagcagccactggtaattgatttagaggagttagtcttgaagtcatgcgccggttaaggctaaactgaaaggacaagttttggtgactgcgctcctccaagccagttacctcggttcaaagagttggtagctcagagaaccttcgaaaaaccgccctgcaaggcggttttttcgttttcagagcaagagattacgcgcagaccaaaacgatctcaagaagatcatcttattaagtctgacgctctattcaacaaagccgccgtccatgggtagggggcttcaaatcgtcctcgtgataccaattcggagcctgcttttttgtacaaacttgttgataatggcaattcaaggatcttcacctagatccttttaaattaaaaatgaagttttaaatcaatctaaagtatatatgagtaaacttggtctgacagttaccaatgcttaatcagtgaggcacctatctcagcgatctgtctatttcgttcatccatagttgcctgactccccgtcgtgtagataactacgatacgggagggcttaccatctggccccagtgctgcaatgataccgcgagagccacgctcaccggctccagatttatcagcaataaaccagccagccggaagggccgagcgcagaagtggtcctgcaactttatccgcctccatccagtctattaattgttgccgggaagctagagtaagtagttcgccagttaatagtttgcgcaacgttgttgccattgctacaggcatcgtggtgtcacgctcgtcgtttggtatggcttcattcagctccggttcccaacgatcaaggcgagttacatgatcccccatgttgtgcaaaaaagcggttagctccttcggtcctccgatcgttgtcagaagtaagttggccgcagtgttatcactcatggttatggcagcactgcataattctcttactgtcatgccatccgtaagatgcttttctgtgactggtgagtactcaaccaagtcattctgagaatagtgtatgcggcgaccgagttgctcttgcccggcgtcaatacgggataataccgcgccacatagcagaactttaaaagtgctcatcattggaaaacgttcttcggggcgaaaactctcaaggatcttaccgctgttgagatccagttcgatgtaacccactcgtgcacccaactgatcttcagcatcttttactttcaccagcgtttctgggtgagcaaaaacaggaaggcaaaatgccgcaaaaaagggaataagggcgacacggaaatgttgaatactcatactcttcctttttcaatattattgaagcatttatcagggttattgtctcatgagcggatacatatttgaatgtatttagaaaaataaacaaataggggttccgcgcacatttccccgaaaagtgccagatacctgaaacaaaacccatcgtacggccaaggaagtctccaataactgtgatccaccacaagcgccagggttttcccagtcacgacgttgtaaaacgacggccagtcatgcataatccgcacgcatctggaataaggaagtgccattccgcctgacctttgcctatgaggaccaaaacgaaaaaacaccctttcgggtgtcttttctggaatttggtaccgagaggctccatgattcagtatgacttgcctttggtcgaaaaaaaaagcccgcactgtcaggtgcgggcttttttctgtgtttccttattaggacccactttcacatttaagttgtttttctaatccgcatatgatcaattcaaggccgaataagaaggctggctctgcaccttggtgatcaaataattcgatagcttgtcgtaataatggcggcatactatcagtagtaggtgtttccctttcttctttagcgacttgatgctcttgatcttccaatacgcaacctaaagtaaaatgccccacagcgctgagtgcatataatgcattctctagtgaaaaaccttgttggcataaaaaggctaattgattttcgagagtttcatactgtttttctgtaggccgtgtacctaaatgtacttttgctccatcgcgatgacttagtaaagcacatctaaaacttttagcgttattacgtaaaaaatcttgccagctttccccttctaaagggcaaaagtgagtatggtgcctatctaacatctcaatggctaaggcgtcgagcaaagcccgcttattttttacatgccaatacaatgtaggctgctctacacctagcttctgggcgagtttacgggttgttaaaccttcgattccgacctcattaagcagctctaatgcgctgttaatcactttacttttatctaatctggacatattcaccaccctgaattgactctcttccgggcgctatcatgccataccgcgaaaggttttgcgccattcgatggcgcgccgccattgcttgtgcaatgtacatcagagattttgagacacaaccaattattgaaggcctccctaacggggggcctttttttgtttctggtcccccgcttaacgatcgttggctgttttcagcaggacgcactgacctccctatcagtgatagagattgacatccctatcagtgatagagatactgagcacagctgtcaccggatgtgctttccggtctgatgagtccgtgaggacgaaacagcctctacaaataattttgtttaaatcacacgggtaaggaggtatttaaatgaaaacactgtcccaagcacagtcgaagacgagtagccagcagttttctttcaccggtaattctagcgctaacgtgattatcggcaaccagaaactaactatcaacgacgtcgcccgcgttgctcggaacgggaccttagtaagcctgactaacaacactgatatacttcaaggcattcaggcgtcctgtgattatatcaataacgcagttgagtctggtgaaccaatttacggtgtgacctcaggcttcggcggtatggcgaacgttgctatcagccgtgaacaggcctccgaactgcaagagaatttggtatggcatatgaaaactggtgctgggaacaaactccctttggcggacgtacgtgcagcaatgctgctgcgcgccaactcgcatatgcgtggcgcgtccggtatccgtctggagctgatcaaacgtatggaaatcttcttgaacgctggtgttactccgtacgtttatgaatttggatctatcggcgcttctggagatctggtcccgctgagctacattacgggttccctgattggccttgacccgagcttcaaggtggatttcaacggcaaagaaatggacgccccgaccgcgttacgccagttaaatctgtctcccctgacacttctgcctaaagaaggtattgctatggtcaatgggacctcagtcatgactggcatcgcagctaactgcgtatacgacacccagatcctgactgcgattgcaatgggtgttcacgctctggatatccaggccctgaacggcaccaaccagtctttccacccgtttatccataactctaagccgcacccaggtcagctgtgggcggctgatcagatgatatcattgctggctaactcgcaactggtacgggacgagctggacggcaaacatgattaccgcgaccacgagctgatccaggatcgttatagcctgcgttgccttccgcagtacctgggtccgattgtggacggtatctcacagatagcaaaacaaatcgaaattgaaattaactccgttactgataaccctctgattgacgtcgataaccaggcgtcgtaccacggcggaaatttcctgggtcagtatgttggcatgggtatggaccaccttcgctactatatcggcctgctggcgaaacacctggatgtgcagattgcgctgctagctagtcccgaatttagcaacggactgccgccatctttattgggcaaccgtgaacgtaaggttaacatgggtctgaaaggtttacaaatctgtggcaattccatcatgccgctgctgacgttctacggcaatagcatcgccgaccgctttccgacccatgcagagcaattcaaccagaatatcaactctcagggctacacctccgcaacgctggcgcgacgtagtgttgatatcttccaaaactacgttgcgattgccctgatgtttggcgtccaggctgtagacctgaggacttataaaaagactggccattacgatgcgcgtgcttgcctctctccggctaccgaacgcctgtattccgccgtgcgtcacgtagttggtcagaaacctacttcagatcgcccatacatctggaacgataacgagcagggtctggatgaacacatcgctcgcatctccgctgacattgccgctggcggagtaattgttcaagctgtacaggatatcctgccgtgcctgcactaaccggcttatcggtcagtttcacctgatttacgtaaaaacccgcttcggcgggtttttgcttttggaggggcagaaagatgaatgactgtccacgacgctatacccaaaagaaa

SEQ ID NO: 357 - DNA, 5122 bp, synthetic construct
  source 1..5122: mol_type = other DNA
aggctaggtggaggctcagtgatgataagtctgcgatggtggatgcatgtgtcatggtcatagctgtttcctgtgtgaaattgttatccgctcagagggcacaatcctattccgcgctatccgacaatctccaagacattaggtggagttcagttcggcgagcggaaatggcttacgaacggggcggagatttcctggaagatgccaggaagatacttaacagggaagtgagagggccgcggcaaagccgtttttccataggctccgcccccctgacaagcatcacgaaatctgacgctcaaatcagtggtggcgaaacccgacaggactataaagataccaggcgtttccccctggcggctccctcgtgcgctctcctgttcctgcctttcggtttaccggtgtcattccgctgttatggccgcgtttgtctcattccacgcctgacactcagttccgggtaggcagttcgctccaagctggactgtatgcacgaaccccccgttcagtccgaccgctgcgccttatccggtaactatcgtcttgagtccaacccggaaagacatgcaaaagcaccactggcagcagccactggtaattgatttagaggagttagtcttgaagtcatgcgccggttaaggctaaactgaaaggacaagttttggtgactgcgctcctccaagccagttacctcggttcaaagagttggtagctcagagaaccttcgaaaaaccgccctgcaaggcggttttttcgttttcagagcaagagattacgcgcagaccaaaacgatctcaagaagatcatcttattaagtctgacgctctattcaacaaagccgccgtccatgggtagggggcttcaaatcgtcctcgtgataccaattcggagcctgcttttttgtacaaacttgttgataatggcaattcaaggatcttcacctagatccttttaaattaaaaatgaagttttaaatcaatctaaagtatatatgagtaaacttggtctgacagttaccaatgcttaatcagtgaggcacctatctcagcgatctgtctatttcgttcatccatagttgcctgactccccgtcgtgtagataactacgatacgggagggcttaccatctggccccagtgctgcaatgataccgcgagagccacgctcaccggctccagatttatcagcaataaaccagccagccggaagggccgagcgcagaagtggtcctgcaactttatccgcctccatccagtctattaattgttgccgggaagctagagtaagtagttcgccagttaatagtttgcgcaacgttgttgccattgctacaggcatcgtggtgtcacgctcgtcgtttggtatggcttcattcagctccggttcccaacgatcaaggcgagttacatgatcccccatgttgtgcaaaaaagcggttagctccttcggtcctccgatcgttgtcagaagtaagttggccgcagtgttatcactcatggttatggcagcactgcataattctcttactgtcatgccatccgtaagatgcttttctgtgactggtgagtactcaaccaagtcattctgagaatagtgtatgcggcgaccgagttgctcttgcccggcgtcaatacgggataataccgcgccacatagcagaactttaaaagtgctcatcattggaaaacgttcttcggggcgaaaactctcaaggatcttaccgctgttgagatccagttcgatgtaacccactcgtgcacccaactgatcttcagcatcttttactttcaccagcgtttctgggtgagcaaaaacaggaaggcaaaatgccgcaaaaaagggaataagggcgacacggaaatgttgaatactcatactcttcctttttcaatattattgaagcatttatcagggttattgtctcatgagcggatacatatttgaatgtatttagaaaaataaacaaataggggttccgcgcacatttccccgaaaagtgccagatacctgaaacaaaacccatcgtacggccaaggaagtctccaataactgtgatccaccacaagcgccagggttttcccagtcacgacgttgtaaaacgacggccagtcatgcataatccgcacgcatctggaataaggaagtgccattccgcctgacctttgcctatgaggaccaaaacgaaaaaacaccctttcgggtgtcttttctggaatttggtaccgagaggctccatgattcagtatgacttgcctttggtcgaaaaaaaaagcccgcactgtcaggtgcgggcttttttctgtgtttccttattaggacccactttcacatttaagttgtttttctaatccgcatatgatcaattcaaggccgaataagaaggctggctctgcaccttggtgatcaaataattcgatagcttgtcgtaataatggcggcatactatcagtagtaggtgtttccctttcttctttagcgacttgatgctcttgatcttccaatacgcaacctaaagtaaaatgccccacagcgctgagtgcatataatgcattctctagtgaaaaaccttgttggcataaaaaggctaattgattttcgagagtttcatactgtttttctgtaggccgtgtacctaaatgtacttttgctccatcgcgatgacttagtaaagcacatctaaaacttttagcgttattacgtaaaaaatcttgccagctttccccttctaaagggcaaaagtgagtatggtgcctatctaacatctcaatggctaaggcgtcgagcaaagcccgcttattttttacatgccaatacaatgtaggctgctctacacctagcttctgggcgagtttacgggttgttaaaccttcgattccgacctcattaagcagctctaatgcgctgttaatcactttacttttatctaatctggacatattcaccaccctgaattgactctcttccgggcgctatcatgccataccgcgaaaggttttgcgccattcgatggcgcgccgccattgcttgtgcaatgtacatcagagattttgagacacaaccaattattgaaggcctccctaacggggggcctttttttgtttctggtcccccgcttaacgatcgttggctgttttcagcaggacgcactgacctccctatcagtgatagagattgacatccctatcagtgatagagatactgagcacagctgtcaccggatgtgctttccggtctgatgagtccgtgaggacgaaacagcctctacaaataattttgtttaaatcacacgggtaaggaggtatttaaatgaaaacactgtcccaagcacagtcgaagacgagtagccagcagttttctttcaccggtaattctagcgctaacgtgattatcggcaaccagaaactaactatcaacgacgtcgcccgcgttgctcggaacgggaccttagtaagcctgactaacaacactgatatacttcaaggcattcaggcgtcctgtgattatatcaataacgcagttgagtctggtgaaccaatttacggtgtgacctcaggcttcggcggtatggcgaacgttgctatcagccgtgaacaggcctccgaactgcaaaccaatttggtatggtcgacgaaaactggtgctgggaacaaactccctttggcggacgtacgtgcagcaatgctgctgcgcgccaactcgcatatgcgtggcgcgtccggtatccgtctggagctgatcaaacgtatggaaatcttcttgaacgctggtgttactccgtacgtttatgaatttggatctatcggcgcttctggagatctggtcccgctgagctacattacgggttccctgattggccttgacccgagcttcaaggtggatttcaacggcaaagaaatggacgccccgaccgcgttacgccagttaaatctgtctcccctgacacttctgcctaaagaagccattgctatgattaatgggacctcagtcatgactggcatcgcagctaactgcgtatacgacacccagatcctgactgcgattgcaatgggtgttcacgctctggatatccaggccctgaacggcaccaaccagtctttccacccgtttatccataactctaagccgcacccaggtcagctgtgggcggctgatcagatgatatcattgctggctaactcgcaactggtacgggacgagctggacggcaaacatgattaccgcgaccacgagctgatccaggatcgttatagcctgcgttgccttccgcagtacctgggtccgattgtggacggtatctcacagatagcaaaacaaatcgaaattgaaattaactccgttactgataaccctctgattgacgtcgataaccaggcgtcgtaccacggcggaaatttcctgggtcagtatgttggcatgggtatggaccaccttcgctactatatcggcctgctggcgaaacacctggatgtgcagattgcgctgctagctagtcccgaatttagcaacggactgccgccatctttattgggcaaccgtgaacgtaaggttaacatgggtctgaaaggtttacaaatctgtggcaattccatcatgccgctgctgacgttctacggcaatagcatcgccgaccgctttccgacccatgcagagcaattcaaccagaatatcaactctcagggctacacctccgcaacgctggcgcgacgtagtgttgatatcttccaaaactacgttgcgattgccctgatgtttggcgtccaggctgtagacctgaggacttataaaaagactggccattacgatgcgcgtgcttgcctctctccggctaccgaacgcctgtattccgccgtgcgtcacgtagttggtcagaaacctacttcagatcgcccatacatctggaacgataacgagcagggtctggatgaacacatcgctcgcatctccgctgacattgccgctggcggagtaattgttcaagctgtacaggatatcctgccgtgcctgcactaaccggcttatcggtcagtttcacctgatttacgtaaaaacccgcttcggcgggtttttgcttttggaggggcagaaagatgaatgactgtccacgacgctatacccaaaagaaa

SEQ ID NO: 358 - DNA, 5122 bp, synthetic construct
  source 1..5122: mol_type = other DNA
aggctaggtggaggctcagtgatgataagtctgcgatggtggatgcatgtgtcatggtcatagctgtttcctgtgtgaaattgttatccgctcagagggcacaatcctattccgcgctatccgacaatctccaagacattaggtggagttcagttcggcgagcggaaatggcttacgaacggggcggagatttcctggaagatgccaggaagatacttaacagggaagtgagagggccgcggcaaagccgtttttccataggctccgcccccctgacaagcatcacgaaatctgacgctcaaatcagtggtggcgaaacccgacaggactataaagataccaggcgtttccccctggcggctccctcgtgcgctctcctgttcctgcctttcggtttaccggtgtcattccgctgttatggccgcgtttgtctcattccacgcctgacactcagttccgggtaggcagttcgctccaagctggactgtatgcacgaaccccccgttcagtccgaccgctgcgccttatccggtaactatcgtcttgagtccaacccggaaagacatgcaaaagcaccactggcagcagccactggtaattgatttagaggagttagtcttgaagtcatgcgccggttaaggctaaactgaaaggacaagttttggtgactgcgctcctccaagccagttacctcggttcaaagagttggtagctcagagaaccttcgaaaaaccgccctgcaaggcggttttttcgttttcagagcaagagattacgcgcagaccaaaacgatctcaagaagatcatcttattaagtctgacgctctattcaacaaagccgccgtccatgggtagggggcttcaaatcgtcctcgtgataccaattcggagcctgcttttttgtacaaacttgttgataatggcaattcaaggatcttcacctagatccttttaaattaaaaatgaagttttaaatcaatctaaagtatatatgagtaaacttggtctgacagttaccaatgcttaatcagtgaggcacctatctcagcgatctgtctatttcgttcatccatagttgcctgactccccgtcgtgtagataactacgatacgggagggcttaccatctggccccagtgctgcaatgataccgcgagagccacgctcaccggctccagatttatcagcaataaaccagccagccggaagggccgagcgcagaagtggtcctgcaactttatccgcctccatccagtctattaattgttgccgggaagctagagtaagtagttcgccagttaatagtttgcgcaacgttgttgccattgctacaggcatcgtggtgtcacgctcgtcgtttggtatggcttcattcagctccggttcccaacgatcaaggcgagttacatgatcccccatgttgtgcaaaaaagcggttagctccttcggtcctccgatcgttgtcagaagtaagttggccgcagtgttatcactcatggttatggcagcactgcataattctcttactgtcatgccatccgtaagatgcttttctgtgactggtgagtactcaaccaagtcattctgagaatagtgtatgcggcgaccgagttgctcttgcccggcgtcaatacgggataataccgcgccacatagcagaactttaaaagtgctcatcattggaaaacgttcttcggggcgaaaactctcaaggatcttaccgctgttgagatccagttcgatgtaacccactcgtgcacccaactgatcttcagcatcttttactttcaccagcgtttctgggtgagcaaaaacaggaaggcaaaatgccgcaaaaaagggaataagggcgacacggaaatgttgaatactcatactcttcctttttcaatattattgaagcatttatcagggttattgtctcatgagcggatacatatttgaatgtatttagaaaaataaacaaataggggttccgcgcacatttccccgaaaagtgccagatacctgaaacaaaacccatcgtacggccaaggaagtctccaataactgtgatccaccacaagcgccagggttttcccagtcacgacgttgtaaaacgacggccagtcatgcataatccgcacgcatctggaataaggaagtgccattccgcctgacctttgcctatgaggaccaaaacgaaaaaacaccctttcgggtgtcttttctggaatttggtaccgagaggctccatgattcagtatgacttgcctttggtcgaaaaaaaaagcccgcactgtcaggtgcgggcttttttctgtgtttccttattaggacccactttcacatttaagttgtttttctaatccgcatatgatcaattcaaggccgaataagaaggctggctctgcaccttggtgatcaaataattcgatagcttgtcgtaataatggcggcatactatcagtagtaggtgtttccctttcttctttagcgacttgatgctcttgatcttccaatacgcaacctaaagtaaaatgccccacagcgctgagtgcatataatgcattctctagtgaaaaaccttgttggcataaaaaggctaattgattttcgagagtttcatactgtttttctgtaggccgtgtacctaaatgtacttttgctccatcgcgatgacttagtaaagcacatctaaaacttttagcgttattacgtaaaaaatcttgccagctttccccttctaaagggcaaaagtgagtatggtgcctatctaacatctcaatggctaaggcgtcgagcaaagcccgcttattttttacatgccaatacaatgtaggctgctctacacctagcttctgggcgagtttacgggttgttaaaccttcgattccgacctcattaagcagctctaatgcgctgttaatcactttacttttatctaatctggacatattcaccaccctgaattgactctcttccgggcgctatcatgccataccgcgaaaggttttgcgccattcgatggcgcgccgccattgcttgtgcaatgtacatcagagattttgagacacaaccaattattgaaggcctccctaacggggggcctttttttgtttctggtcccccgcttaacgatcgttggctgttttcagcaggacgcactgacctccctatcagtgatagagattgacatccctatcagtgatagagatactgagcacagctgtcaccggatgtgctttccggtctgatgagtccgtgaggacgaaacagcctctacaaataattttgtttaaatcacacgggtaaggaggtatttaaatgaaaacactgtcccaagcacagtcgaagacgagtagccagcagttttctttcaccggtaattctagcgctaacgtgattatcggcaaccagaaactaactatcaacgacgtcgcccgcgttgctcggaacgggaccttagtaagcctgactaacaacactgatatacttcaaggcattcaggcgtcctgtgattatatcaataacgcagttgagtctggtgaaccaatttacggtgtgacctcaggcttcggcggtatggcgaacgttgctatcagccgtgaacaggcctccgaactgcaagagaatgtcgtatggtatcataaaactggtgctgggaacaaactccctttggcggacgtacgtgcagcaatgctgctgcgcgccaactcgcatatgcgtggcgcgtccggtatccgtctggagctgatcaaacgtatggaaatcttcttgaacgctggtgttactccgtacgtttatgaatttggatctatcggcgcttctggagatctggtcccgctgagctacattacgggttccctgattggccttgacccgagcttcaaggtggatttcaacggcaaagaaatggacgccccgaccgcgttacgccagttaaatctgtctcccctgacacttctgcctaaagaaggtattgctatgcttaatgggacctcagtcatgactggcatcgcagctaactgcgtatacgacacccagatcctgactgcgattgcaatgggtgttcacgctctggatatccaggccctgaacggcaccaaccagtctttccacccgtttatccataactctaagccgcacccaggtcagctgtgggcggctgatcagatgatatcattgctggctaactcgcaactggtacgggacgagctggacggcaaacatgattaccgcgaccacgagctgatccaggatcgttatagcctgcgttgccttccgcagtacctgggtccgattgtggacggtatctcacagatagcaaaacaaatcgaaattgaaattaactccgttactgataaccctctgattgacgtcgataaccaggcgtcgtaccacggcggaaatttcctgggtcagtatgttggcatgggtatggaccaccttcgctactatatcggcctgctggcgaaacacctggatgtgcagattgcgctgctagctagtcccgaatttagcaacggactgccgccatctttattgggcaaccgtgaacgtaaggttaacatgggtctgaaaggtttacaaatctgtggcaattccatcatgccgctgctgacgttctacggcaatagcatcgccgaccgctttccgacccatgcagagcaattcaaccagaatatcaactctcagggctacacctccgcaacgctggcgcgacgtagtgttgatatcttccaaaactacgttgcgattgccctgatgtttggcgtccaggctgtagacctgaggacttataaaaagactggccattacgatgcgcgtgcttgcctctctccggctaccgaacgcctgtattccgccgtgcgtcacgtagttggtcagaaacctacttcagatcgcccatacatctggaacgataacgagcagggtctggatgaacacatcgctcgcatctccgctgacattgccgctggcggagtaattgttcaagctgtacaggatatcctgccgtgcctgcactaaccggcttatcggtcagtttcacctgatttacgtaaaaacccgcttcggcgggtttttgcttttggaggggcagaaagatgaatgactgtccacgacgctatacccaaaagaaa

SEQ ID NO: 359 - DNA, 5122 bp, synthetic construct
  source 1..5122: mol_type = other DNA
aggctaggtggaggctcagtgatgataagtctgcgatggtggatgcatgtgtcatggtcatagctgtttcctgtgtgaaattgttatccgctcagagggcacaatcctattccgcgctatccgacaatctccaagacattaggtggagttcagttcggcgagcggaaatggcttacgaacggggcggagatttcctggaagatgccaggaagatacttaacagggaagtgagagggccgcggcaaagccgtttttccataggctccgcccccctgacaagcatcacgaaatctgacgctcaaatcagtggtggcgaaacccgacaggactataaagataccaggcgtttccccctggcggctccctcgtgcgctctcctgttcctgcctttcggtttaccggtgtcattccgctgttatggccgcgtttgtctcattccacgcctgacactcagttccgggtaggcagttcgctccaagctggactgtatgcacgaaccccccgttcagtccgaccgctgcgccttatccggtaactatcgtcttgagtccaacccggaaagacatgcaaaagcaccactggcagcagccactggtaattgatttagaggagttagtcttgaagtcatgcgccggttaaggctaaactgaaaggacaagttttggtgactgcgctcctccaagccagttacctcggttcaaagagttggtagctcagagaaccttcgaaaaaccgccctgcaaggcggttttttcgttttcagagcaagagattacgcgcagaccaaaacgatctcaagaagatcatcttattaagtctgacgctctattcaacaaagccgccgtccatgggtagggggcttcaaatcgtcctcgtgataccaattcggagcctgcttttttgtacaaacttgttgataatggcaattcaaggatcttcacctagatccttttaaattaaaaatgaagttttaaatcaatctaaagtatatatgagtaaacttggtctgacagttaccaatgcttaatcagtgaggcacctatctcagcgatctgtctatttcgttcatccatagttgcctgactccccgtcgtgtagataactacgatacgggagggcttaccatctggccccagtgctgcaatgataccgcgagagccacgctcaccggctccagatttatcagcaataaaccagccagccggaagggccgagcgcagaagtggtcctgcaactttatccgcctccatccagtctattaattgttgccgggaagctagagtaagtagttcgccagttaatagtttgcgcaacgttgttgccattgctacaggcatcgtggtgtcacgctcgtcgtttggtatggcttcattcagctccggttcccaacgatcaaggcgagttacatgatcccccatgttgtgcaaaaaagcggttagctccttcggtcctccgatcgttgtcagaagtaagttggccgcagtgttatcactcatggttatggcagcactgcataattctcttactgtcatgccatccgtaagatgcttttctgtgactggtgagtactcaaccaagtcattctgagaatagtgtatgcggcgaccgagttgctcttgcccggcgtcaatacgggataataccgcgccacatagcagaactttaaaagtgctcatcattggaaaacgttcttcggggcgaaaactctcaaggatcttaccgctgttgagatccagttcgatgtaacccactcgtgcacccaactgatcttcagcatcttttactttcaccagcgtttctgggtgagcaaaaacaggaaggcaaaatgccgcaaaaaagggaataagggcgacacggaaatgttgaatactcatactcttcctttttcaatattattgaagcatttatcagggttattgtctcatgagcggatacatatttgaatgtatttagaaaaataaacaaataggggttccgcgcacatttccccgaaaagtgccagatacctgaaacaaaacccatcgtacggccaaggaagtctccaataactgtgatccaccacaagcgccagggttttcccagtcacgacgttgtaaaacgacggccagtcatgcataatccgcacgcatctggaataaggaagtgccattccgcctgacctttgcctatgaggaccaaaacgaaaaaacaccctttcgggtgtcttttctggaatttggtaccgagaggctccatgattcagtatgacttgcctttggtcgaaaaaaaaagcccgcactgtcaggtgcgggcttttttctgtgtttccttattaggacccactttcacatttaagttgtttttctaatccgcatatgatcaattcaaggccgaataagaaggctggctctgcaccttggtgatcaaataattcgatagcttgtcgtaataatggcggcatactatcagtagtaggtgtttccctttcttctttagcgacttgatgctcttgatcttccaatacgcaacctaaagtaaaatgccccacagcgctgagtgcatataatgcattctctagtgaaaaaccttgttggcataaaaaggctaattgattttcgagagtttcatactgtttttctgtaggccgtgtacctaaatgtacttttgctccatcgcgatgacttagtaaagcacatctaaaacttttagcgttattacgtaaaaaatcttgccagctttccccttctaaagggcaaaagtgagtatggtgcctatctaacatctcaatggctaaggcgtcgagcaaagcccgcttattttttacatgccaatacaatgtaggctgctctacacctagcttctgggcgagtttacgggttgttaaaccttcgattccgacctcattaagcagctctaatgcgctgttaatcactttacttttatctaatctggacatattcaccaccctgaattgactctcttccgggcgctatcatgccataccgcgaaaggttttgcgccattcgatggcgcgccgccattgcttgtgcaatgtacatcagagattttgagacacaaccaattattgaaggcctccctaacggggggcctttttttgtttctggtcccccgcttaacgatcgttggctgttttcagcaggacgcactgacctccctatcagtgatagagattgacatccctatcagtgatagagatactgagcacagctgtcaccggatgtgctttccggtctgatgagtccgtgaggacgaaacagcctctacaaataattttgtttaaatcacacgggtaaggaggtatttaaatgaaaacactgtcccaagcacagtcgaagacgagtagccagcagttttctttcaccggtaattctagcgctaacgtgattatcggcaaccagaaactaactatcaacgacgtcgcccgcgttgctcggaacgggaccttagtaagcctgactaacaacactgatatacttcaaggcattcaggcgtcctgtgattatatcaataacgcagttgagtctggtgaaccaatttacggtgtgacctcaggcttcggcggtatggcgaacgttgctatcagccgtgaacaggcctccgaactgcaaaagaatgtcgtatggcatctgaaaactggtgctgggaacaaactccctttggcggacgtacgtgcagcaatgctgctgcgcgccaactcgcatatgcgtggcgcgtccggtatccgtctggagctgatcaaacgtatggaaatcttcttgaacgctggtgttactccgtacgtttatgaatttggatctatcggcgcttctggagatctggtcccgctgagctacattacgggttccctgattggccttgacccgagcttcaaggtggatttcaacggcaaagaaatggacgccccgaccgcgttacgccagttaaatctgtctcccctgacacttctgcctaaagaaggtctagctatgattaatgggacctcagtcatgactggcatcgcagctaactgcgtatacgacacccagatcctgactgcgattgcaatgggtgttcacgctctggatatccaggccctgaacggcaccaaccagtctttccacccgtttatccataactctaagccgcacccaggtcagctgtgggcggctgatcagatgatatcattgctggctaactcgcaactggtacgggacgagctggacggcaaacatgattaccgcgaccacgagctgatccaggatcgttatagcctgcgttgccttccgcagtacctgggtccgattgtggacggtatctcacagatagcaaaacaaatcgaaattgaaattaactccgttactgataaccctctgattgacgtcgataaccaggcgtcgtaccacggcggaaatttcctgggtcagtatgttggcatgggtatggaccaccttcgctactatatcggcctgctggcgaaacacctggatgtgcagattgcgctgctagctagtcccgaatttagcaacggactgccgccatctttattgggcaaccgtgaacgtaaggttaacatgggtctgaaaggtttacaaatctgtggcaattccatcatgccgctgctgacgttctacggcaatagcatcgccgaccgctttccgacccatgcagagcaattcaaccagaatatcaactctcagggctacacctccgcaacgctggcgcgacgtagtgttgatatcttccaaaactacgttgcgattgccctgatgtttggcgtccaggctgtagacctgaggacttataaaaagactggccattacgatgcgcgtgcttgcctctctccggctaccgaacgcctgtattccgccgtgcgtcacgtagttggtcagaaacctacttcagatcgcccatacatctggaacgataacgagcagggtctggatgaacacatcgctcgcatctccgctgacattgccgctggcggagtaattgttcaagctgtacaggatatcctgccgtgcctgcactaaccggcttatcggtcagtttcacctgatttacgtaaaaacccgcttcggcgggtttttgcttttggaggggcagaaagatgaatgactgtccacgacgctatacccaaaagaaa

SEQ ID NO: 360 - DNA, 5122 bp, synthetic construct
  source 1..5122: mol_type = other DNA
aggctaggtggaggctcagtgatgataagtctgcgatggtggatgcatgtgtcatggtcatagctgtttcctgtgtgaaattgttatccgctcagagggcacaatcctattccgcgctatccgacaatctccaagacattaggtggagttcagttcggcgagcggaaatggcttacgaacggggcggagatttcctggaagatgccaggaagatacttaacagggaagtgagagggccgcggcaaagccgtttttccataggctccgcccccctgacaagcatcacgaaatctgacgctcaaatcagtggtggcgaaacccgacaggactataaagataccaggcgtttccccctggcggctccctcgtgcgctctcctgttcctgcctttcggtttaccggtgtcattccgctgttatggccgcgtttgtctcattccacgcctgacactcagttccgggtaggcagttcgctccaagctggactgtatgcacgaaccccccgttcagtccgaccgctgcgccttatccggtaactatcgtcttgagtccaacccggaaagacatgcaaaagcaccactggcagcagccactggtaattgatttagaggagttagtcttgaagtcatgcgccggttaaggctaaactgaaaggacaagttttggtgactgcgctcctccaagccagttacctcggttcaaagagttggtagctcagagaaccttcgaaaaaccgccctgcaaggcggttttttcgttttcagagcaagagattacgcgcagaccaaaacgatctcaagaagatcatcttattaagtctgacgctctattcaacaaagccgccgtccatgggtagggggcttcaaatcgtcctcgtgataccaattcggagcctgcttttttgtacaaacttgttgataatggcaattcaaggatcttcacctagatccttttaaattaaaaatgaagttttaaatcaatctaaagtatatatgagtaaacttggtctgacagttaccaatgcttaatcagtgaggcacctatctcagcgatctgtctatttcgttcatccatagttgcctgactccccgtcgtgtagataactacgatacgggagggcttaccatctggccccagtgctgcaatgataccgcgagagccacgctcaccggctccagatttatcagcaataaaccagccagccggaagggccgagcgcagaagtggtcctgcaactttatccgcctccatccagtctattaattgttgccgggaagctagagtaagtagttcgccagttaatagtttgcgcaacgttgttgccattgctacaggcatcgtggtgtcacgctcgtcgtttggtatggcttcattcagctccggttcccaacgatcaaggcgagttacatgatcccccatgttgtgcaaaaaagcggttagctccttcggtcctccgatcgttgtcagaagtaagttggccgcagtgttatcactcatggttatggcagcactgcataattctcttactgtcatgccatccgtaagatgcttttctgtgactggtgagtactcaaccaagtcattctgagaatagtgtatgcggcgaccgagttgctcttgcccggcgtcaatacgggataataccgcgccacatagcagaactttaaaagtgctcatcattggaaaacgttcttcggggcgaaaactctcaaggatcttaccgctgttgagatccagttcgatgtaacccactcgtgcacccaactgatcttcagcatcttttactttcaccagcgtttctgggtgagcaaaaacaggaaggcaaaatgccgcaaaaaagggaataagggcgacacggaaatgttgaatactcatactcttcctttttcaatattattgaagcatttatcagggttattgtctcatgagcggatacatatttgaatgtatttagaaaaataaacaaataggggttccgcgcacatttccccgaaaagtgccagatacctgaaacaaaacccatcgtacggccaaggaagtctccaataactgtgatccaccacaagcgccagggttttcccagtcacgacgttgtaaaacgacggccagtcatgcataatccgcacgcatctggaataaggaagtgccattccgcctgacctttgcctatgaggaccaaaacgaaaaaacaccctttcgggtgtcttttctggaatttggtaccgagaggctccatgattcagtatgacttgcctttggtcgaaaaaaaaagcccgcactgtcaggtgcgggcttttttctgtgtttccttattaggacccactttcacatttaagttgtttttctaatccgcatatgatcaattcaaggccgaataagaaggctggctctgcaccttggtgatcaaataattcgatagcttgtcgtaataatggcggcatactatcagtagtaggtgtttccctttcttctttagcgacttgatgctcttgatcttccaatacgcaacctaaagtaaaatgccccacagcgctgagtgcatataatgcattctctagtgaaaaaccttgttggcataaaaaggctaattgattttcgagagtttcatactgtttttctgtaggccgtgtacctaaatgtacttttgctccatcgcgatgacttagtaaagcacatctaaaacttttagcgttattacgtaaaaaatcttgccagctttccccttctaaagggcaaaagtgagtatggtgcctatctaacatctcaatggctaaggcgtcgagcaaagcccgcttattttttacatgccaatacaatgtaggctgctctacacctagcttctgggcgagtttacgggttgttaaaccttcgattccgacctcattaagcagctctaatgcgctgttaatcactttacttttatctaatctggacatattcaccaccctgaattgactctcttccgggcgctatcatgccataccgcgaaaggttttgcgccattcgatggcgcgccgccattgcttgtgcaatgtacatcagagattttgagacacaaccaattattgaaggcctccctaacggggggcctttttttgtttctggtcccccgcttaacgatcgttggctgttttcagcaggacgcactgacctccctatcagtgatagagattgacatccctatcagtgatagagatactgagcacagctgtcaccggatgtgctttccggtctgatgagtccgtgaggacgaaacagcctctacaaataattttgtttaaatcacacgggtaaggaggtatttaaatgaaaacactgtcccaagcacagtcgaagacgagtagccagcagttttctttcaccggtaattctagcgctaacgtgattatcggcaaccagaaactaactatcaacgacgtcgcccgcgttgctcggaacgggaccttagtaagcctgactaacaacactgatatacttcaaggcattcaggcgtcctgtgattatatcaataacgcagttgagtctggtgaaccaatttacggtgtgacctcaggcttcggcggtatggcgaacgttgctatcagccgtgaacaggcctccgaactgcaacataatatggtatggtatcacaaaactggtgctgggaacaaactccctttggcggacgtacgtgcagcaatgctgctgcgcgccaactcgcatatgcgtggcgcgtccggtatccgtctggagctgatcaaacgtatggaaatcttcttgaacgctggtgttactccgtacgtttatgaatttggatctatcggcgcttctggagatctggtcccgctgagctacattacgggttccctgattggccttgacccgagcttcaaggtggatttcaacggcaaagaaatggacgccccgaccgcgttacgccagttaaatctgtctcccctgacacttctgcctaaagaagcgattgctatgcttaatgggacctcagtcatgactggcatcgcagctaactgcgtatacgacacccagatcctgactgcgattgcaatgggtgttcacgctctggatatccaggccctgaacggcaccaaccagtctttccacccgtttatccataactctaagccgcacccaggtcagctgtgggcggctgatcagatgatatcattgctggctaactcgcaactggtacgggacgagctggacggcaaacatgattaccgcgaccacgagctgatccaggatcgttatagcctgcgttgccttccgcagtacctgggtccgattgtggacggtatctcacagatagcaaaacaaatcgaaattgaaattaactccgttactgataaccctctgattgacgtcgataaccaggcgtcgtaccacggcggaaatttcctgggtcagtatgttggcatgggtatggaccaccttcgctactatatcggcctgctggcgaaacacctggatgtgcagattgcgctgctagctagtcccgaatttagcaacggactgccgccatctttattgggcaaccgtgaacgtaaggttaacatgggtctgaaaggtttacaaatctgtggcaattccatcatgccgctgctgacgttctacggcaatagcatcgccgaccgctttccgacccatgcagagcaattcaaccagaatatcaactctcagggctacacctccgcaacgctggcgcgacgtagtgttgatatcttccaaaactacgttgcgattgccctgatgtttggcgtccaggctgtagacctgaggacttataaaaagactggccattacgatgcgcgtgcttgcctctctccggctaccgaacgcctgtattccgccgtgcgtcacgtagttggtcagaaacctacttcagatcgcccatacatctggaacgataacgagcagggtctggatgaacacatcgctcgcatctccgctgacattgccgctggcggagtaattgttcaagctgtacaggatatcctgccgtgcctgcactaaccggcttatcggtcagtttcacctgatttacgtaaaaacccgcttcggcgggtttttgcttttggaggggcagaaagatgaatgactgtccacgacgctatacccaaaagaaa

SEQ ID NO: 361 - DNA, 5122 bp, synthetic construct
  source 1..5122: mol_type = other DNA
aggctaggtggaggctcagtgatgataagtctgcgatggtggatgcatgtgtcatggtcatagctgtttcctgtgtgaaattgttatccgctcagagggcacaatcctattccgcgctatccgacaatctccaagacattaggtggagttcagttcggcgagcggaaatggcttacgaacggggcggagatttcctggaagatgccaggaagatacttaacagggaagtgagagggccgcggcaaagccgtttttccataggctccgcccccctgacaagcatcacgaaatctgacgctcaaatcagtggtggcgaaacccgacaggactataaagataccaggcgtttccccctggcggctccctcgtgcgctctcctgttcctgcctttcggtttaccggtgtcattccgctgttatggccgcgtttgtctcattccacgcctgacactcagttccgggtaggcagttcgctccaagctggactgtatgcacgaaccccccgttcagtccgaccgctgcgccttatccggtaactatcgtcttgagtccaacccggaaagacatgcaaaagcaccactggcagcagccactggtaattgatttagaggagttagtcttgaagtcatgcgccggttaaggctaaactgaaaggacaagttttggtgactgcgctcctccaagccagttacctcggttcaaagagttggtagctcagagaaccttcgaaaaaccgccctgcaaggcggttttttcgttttcagagcaagagattacgcgcagaccaaaacgatctcaagaagatcatcttattaagtctgacgctctattcaacaaagccgccgtccatgggtagggggcttcaaatcgtcctcgtgataccaattcggagcctgcttttttgtacaaacttgttgataatggcaattcaaggatcttcacctagatccttttaaattaaaaatgaagttttaaatcaatctaaagtatatatgagtaaacttggtctgacagttaccaatgcttaatcagtgaggcacctatctcagcgatctgtctatttcgttcatccatagttgcctgactccccgtcgtgtagataactacgatacgggagggcttaccatctggccccagtgctgcaatgataccgcgagagccacgctcaccggctccagatttatcagcaataaaccagccagccggaagggccgagcgcagaagtggtcctgcaactttatccgcctccatccagtctattaattgttgccgggaagctagagtaagtagttcgccagttaatagtttgcgcaacgttgttgccattgctacaggcatcgtggtgtcacgctcgtcgtttggtatggcttcattcagctccggttcccaacgatcaaggcgagttacatgatcccccatgttgtgcaaaaaagcggttagctccttcggtcctccgatcgttgtcagaagtaagttggccgcagtgttatcactcatggttatggcagcactgcataattctcttactgtcatgccatccgtaagatgcttttctgtgactggtgagtactcaaccaagtcattctgagaatagtgtatgcggcgaccgagttgctcttgcccggcgtcaatacgggataataccgcgccacatagcagaactttaaaagtgctcatcattggaaaacgttcttcggggcgaaaactctcaaggatcttaccgctgttgagatccagttcgatgtaacccactcgtgcacccaactgatcttcagcatcttttactttcaccagcgtttctgggtgagcaaaaacaggaaggcaaaatgccgcaaaaaagggaataagggcgacacggaaatgttgaatactcatactcttcctttttcaatattattgaagcatttatcagggttattgtctcatgagcggatacatatttgaatgtatttagaaaaataaacaaataggggttccgcgcacatttccccgaaaagtgccagatacctgaaacaaaacccatcgtacggccaaggaagtctccaataactgtgatccaccacaagcgccagggttttcccagtcacgacgttgtaaaacgacggccagtcatgcataatccgcacgcatctggaataaggaagtgccattccgcctgacctttgcctatgaggaccaaaacgaaaaaacaccctttcgggtgtcttttctggaatttggtaccgagaggctccatgattcagtatgacttgcctttggtcgaaaaaaaaagcccgcactgtcaggtgcgggcttttttctgtgtttccttattaggacccactttcacatttaagttgtttttctaatccgcatatgatcaattcaaggccgaataagaaggctggctctgcaccttggtgatcaaataattcgatagcttgtcgtaataatggcggcatactatcagtagtaggtgtttccctttcttctttagcgacttgatgctcttgatcttccaatacgcaacctaaagtaaaatgccccacagcgctgagtgcatataatgcattctctagtgaaaaaccttgttggcataaaaaggctaattgattttcgagagtttcatactgtttttctgtaggccgtgtacctaaatgtacttttgctccatcgcgatgacttagtaaagcacatctaaaacttttagcgttattacgtaaaaaatcttgccagctttccccttctaaagggcaaaagtgagtatggtgcctatctaacatctcaatggctaaggcgtcgagcaaagcccgcttattttttacatgccaatacaatgtaggctgctctacacctagcttctgggcgagtttacgggttgttaaaccttcgattccgacctcattaagcagctctaatgcgctgttaatcactttacttttatctaatctggacatattcaccaccctgaattgactctcttccgggcgctatcatgccataccgcgaaaggttttgcgccattcgatggcgcgccgccattgcttgtgcaatgtacatcagagattttgagacacaaccaattattgaaggcctccctaacggggggcctttttttgtttctggtcccccgcttaacgatcgttggctgttttcagcaggacgcactgacctccctatcagtgatagagattgacatccctatcagtgatagagatactgagcacagctgtcaccggatgtgctttccggtctgatgagtccgtgaggacgaaacagcctctacaaataattttgtttaaatcacacgggtaaggaggtatttaaatgaaaacactgtcccaagcacagtcgaagacgagtagccagcagttttctttcaccggtaattctagcgctaacgtgattatcggcaaccagaaactaactatcaacgacgtcgcccgcgttgctcggaacgggaccttagtaagcctgactaacaacactgatatacttcaaggcattcaggcgtcctgtgattatatcaataacgcagttgagtctggtgaaccaatttacggtgtgacctcaggcttcggcggtatggcgaacgttgctatcagccgtgaacaggcctccgaactgcaagagaatttggtatggtatgtgaaaactggtgctgggaacaaactccctttggcggacgtacgtgcagcaatgctgctgcgcgccaactcgcatatgcgtggcgcgtccggtatccgtctggagctgatcaaacgtatggaaatcttcttgaacgctggtgttactccgtacgtttatgaatttggatctatcggcgcttctggagatctggtcccgctgagctacattacgggttccctgattggccttgacccgagcttcaaggtggatttcaacggcaaagaaatggacgccccgaccgcgttacgccagttaaatctgtctcccctgacacttctgcctaaagaatcactagctatgaataatgggacctcagtcatgactggcatcgcagctaactgcgtatacgacacccagatcctgactgcgattgcaatgggtgttcacgctctggatatccaggccctgaacggcaccaaccagtctttccacccgtttatccataactctaagccgcacccaggtcagctgtgggcggctgatcagatgatatcattgctggctaactcgcaactggtacgggacgagctggacggcaaacatgattaccgcgaccacgagctgatccaggatcgttatagcctgcgttgccttccgcagtacctgggtccgattgtggacggtatctcacagatagcaaaacaaatcgaaattgaaattaactccgttactgataaccctctgattgacgtcgataaccaggcgtcgtaccacggcggaaatttcctgggtcagtatgttggcatgggtatggaccaccttcgctactatatcggcctgctggcgaaacacctggatgtgcagattgcgctgctagctagtcccgaatttagcaacggactgccgccatctttattgggcaaccgtgaacgtaaggttaacatgggtctgaaaggtttacaaatctgtggcaattccatcatgccgctgctgacgttctacggcaatagcatcgccgaccgctttccgacccatgcagagcaattcaaccagaatatcaactctcagggctacacctccgcaacgctggcgcgacgtagtgttgatatcttccaaaactacgttgcgattgccctgatgtttggcgtccaggctgtagacctgaggacttataaaaagactggccattacgatgcgcgtgcttgcctctctccggctaccgaacgcctgtattccgccgtgcgtcacgtagttggtcagaaacctacttcagatcgcccatacatctggaacgataacgagcagggtctggatgaacacatcgctcgcatctccgctgacattgccgctggcggagtaattgttcaagctgtacaggatatcctgccgtgcctgcactaaccggcttatcggtcagtttcacctgatttacgtaaaaacccgcttcggcgggtttttgcttttggaggggcagaaagatgaatgactgtccacgacgctatacccaaaagaaa

SEQ ID NO: 362 - DNA, 5122 bp, synthetic construct
  source 1..5122: mol_type = other DNA
aggctaggtggaggctcagtgatgataagtctgcgatggtggatgcatgtgtcatggtcatagctgtttcctgtgtgaaattgttatccgctcagagggcacaatcctattccgcgctatccgacaatctccaagacattaggtggagttcagttcggcgagcggaaatggcttacgaacggggcggagatttcctggaagatgccaggaagatacttaacagggaagtgagagggccgcggcaaagccgtttttccataggctccgcccccctgacaagcatcacgaaatctgacgctcaaatcagtggtggcgaaacccgacaggactataaagataccaggcgtttccccctggcggctccctcgtgcgctctcctgttcctgcctttcggtttaccggtgtcattccgctgttatggccgcgtttgtctcattccacgcctgacactcagttccgggtaggcagttcgctccaagctggactgtatgcacgaaccccccgttcagtccgaccgctgcgccttatccggtaactatcgtcttgagtccaacccggaaagacatgcaaaagcaccactggcagcagccactggtaattgatttagaggagttagtcttgaagtcatgcgccggttaaggctaaactgaaaggacaagttttggtgactgcgctcctccaagccagttacctcggttcaaagagttggtagctcagagaaccttcgaaaaaccgccctgcaaggcggttttttcgttttcagagcaagagattacgcgcagaccaaaacgatctcaagaagatcatcttattaagtctgacgctctattcaacaaagccgccgtccatgggtagggggcttcaaatcgtcctcgtgataccaattcggagcctgcttttttgtacaaacttgttgataatggcaattcaaggatcttcacctagatccttttaaattaaaaatgaagttttaaatcaatctaaagtatatatgagtaaacttggtctgacagttaccaatgcttaatcagtgaggcacctatctcagcgatctgtctatttcgttcatccatagttgcctgactccccgtcgtgtagataactacgatacgggagggcttaccatctggccccagtgctgcaatgataccgcgagagccacgctcaccggctccagatttatcagcaataaaccagccagccggaagggccgagcgcagaagtggtcctgcaactttatccgcctccatccagtctattaattgttgccgggaagctagagtaagtagttcgccagttaatagtttgcgcaacgttgttgccattgctacaggcatcgtggtgtcacgctcgtcgtttggtatggcttcattcagctccggttcccaacgatcaaggcgagttacatgatcccccatgttgtgcaaaaaagcggttagctccttcggtcctccgatcgttgtcagaagtaagttggccgcagtgttatcactcatggttatggcagcactgcataattctcttactgtcatgccatccgtaagatgcttttctgtgactggtgagtactcaaccaagtcattctgagaatagtgtatgcggcgaccgagttgctcttgcccggcgtcaatacgggataataccgcgccacatagcagaactttaaaagtgctcatcattggaaaacgttcttcggggcgaaaactctcaaggatcttaccgctgttgagatccagttcgatgtaacccactcgtgcacccaactgatcttcagcatcttttactttcaccagcgtttctgggtgagcaaaaacaggaaggcaaaatgccgcaaaaaagggaataagggcgacacggaaatgttgaatactcatactcttcctttttcaatattattgaagcatttatcagggttattgtctcatgagcggatacatatttgaatgtatttagaaaaataaacaaataggggttccgcgcacatttccccgaaaagtgccagatacctgaaacaaaacccatcgtacggccaaggaagtctccaataactgtgatccaccacaagcgccagggttttcccagtcacgacgttgtaaaacgacggccagtcatgcataatccgcacgcatctggaataaggaagtgccattccgcctgacctttgcctatgaggaccaaaacgaaaaaacaccctttcgggtgtcttttctggaatttggtaccgagaggctccatgattcagtatgacttgcctttggtcgaaaaaaaaagcccgcactgtcaggtgcgggcttttttctgtgtttccttattaggacccactttcacatttaagttgtttttctaatccgcatatgatcaattcaaggccgaataagaaggctggctctgcaccttggtgatcaaataattcgatagcttgtcgtaataatggcggcatactatcagtagtaggtgtttccctttcttctttagcgacttgatgctcttgatcttccaatacgcaacctaaagtaaaatgccccacagcgctgagtgcatataatgcattctctagtgaaaaaccttgttggcataaaaaggctaattgattttcgagagtttcatactgtttttctgtaggccgtgtacctaaatgtacttttgctccatcgcgatgacttagtaaagcacatctaaaacttttagcgttattacgtaaaaaatcttgccagctttccccttctaaagggcaaaagtgagtatggtgcctatctaacatctcaatggctaaggcgtcgagcaaagcccgcttattttttacatgccaatacaatgtaggctgctctacacctagcttctgggcgagtttacgggttgttaaaccttcgattccgacctcattaagcagctctaatgcgctgttaatcactttacttttatctaatctggacatattcaccaccctgaattgactctcttccgggcgctatcatgccataccgcgaaaggttttgcgccattcgatggcgcgccgccattgcttgtgcaatgtacatcagagattttgagacacaaccaattattgaaggcctccctaacggggggcctttttttgtttctggtcccccgcttaacgatcgttggctgttttcagcaggacgcactgacctccctatcagtgatagagattgacatccctatcagtgatagagatactgagcacagctgtcaccggatgtgctttccggtctgatgagtccgtgaggacgaaacagcctctacaaataattttgtttaaatcacacgggtaaggaggtatttaaatgaaaacactgtcccaagcacagtcgaagacgagtagccagcagttttctttcaccggtaattctagcgctaacgtgattatcggcaaccagaaactaactatcaacgacgtcgcccgcgttgctcggaacgggaccttagtaagcctgactaacaacactgatatacttcaaggcattcaggcgtcctgtgattatatcaataacgcagttgagtctggtgaaccaatttacggtgtgacctcaggcttcggcggtatggcgaacgttgctatcagccgtgaacaggcctccgaactgcaagagaatgtcgtatggtttcataaaactggtgctgggaacaaactccctttggcggacgtacgtgcagcaatgctgctgcgcgccaactcgcatatgcgtggcgcgtccggtatccgtctggagctgatcaaacgtatggaaatcttcttgaacgctggtgttactccgtacgtttatgaatttggatctatcggcgcttctggagatctggtcccgctgagctacattacgggttccctgattggccttgacccgagcttcaaggtggatttcaacggcaaagaaatggacgccccgaccgcgttacgccagttaaatctgtctcccctgacacttctgcctaaagaaggtattgctatgattaatgggacctcagtcatgactggcatcgcagctaactgcgtatacgacacccagatcctgactgcgattgcaatgggtgttcacgctctggatatccaggccctgaacggcaccaaccagtctttccacccgtttatccataactctaagccgcacccaggtcagctgtgggcggctgatcagatgatatcattgctggctaactcgcaactggtacgggacgagctggacggcaaacatgattaccgcgaccacgagctgatccaggatcgttatagcctgcgttgccttccgcagtacctgggtccgattgtggacggtatctcacagatagcaaaacaaatcgaaattgaaattaactccgttactgataaccctctgattgacgtcgataaccaggcgtcgtaccacggcggaaatttcctgggtcagtatgttggcatgggtatggaccaccttcgctactatatcggcctgctggcgaaacacctggatgtgcagattgcgctgctagctagtcccgaatttagcaacggactgccgccatctttattgggcaaccgtgaacgtaaggttaacatgggtctgaaaggtttacaaatctgtggcaattccatcatgccgctgctgacgttctacggcaatagcatcgccgaccgctttccgacccatgcagagcaattcaaccagaatatcaactctcagggctacacctccgcaacgctggcgcgacgtagtgttgatatcttccaaaactacgttgcgattgccctgatgtttggcgtccaggctgtagacctgaggacttataaaaagactggccattacgatgcgcgtgcttgcctctctccggctaccgaacgcctgtattccgccgtgcgtcacgtagttggtcagaaacctacttcagatcgcccatacatctggaacgataacgagcagggtctggatgaacacatcgctcgcatctccgctgacattgccgctggcggagtaattgttcaagctgtacaggatatcctgccgtgcctgcactaaccggcttatcggtcagtttcacctgatttacgtaaaaacccgcttcggcgggtttttgcttttggaggggcagaaagatgaatgactgtccacgacgctatacccaaaagaaa

SEQ ID NO: 363 - DNA, 5122 bp, synthetic construct
  source 1..5122: mol_type = other DNA
aggctaggtggaggctcagtgatgataagtctgcgatggtggatgcatgtgtcatggtcatagctgtttcctgtgtgaaattgttatccgctcagagggcacaatcctattccgcgctatccgacaatctccaagacattaggtggagttcagttcggcgagcggaaatggcttacgaacggggcggagatttcctggaagatgccaggaagatacttaacagggaagtgagagggccgcggcaaagccgtttttccataggctccgcccccctgacaagcatcacgaaatctgacgctcaaatcagtggtggcgaaacccgacaggactataaagataccaggcgtttccccctggcggctccctcgtgcgctctcctgttcctgcctttcggtttaccggtgtcattccgctgttatggccgcgtttgtctcattccacgcctgacactcagttccgggtaggcagttcgctccaagctggactgtatgcacgaaccccccgttcagtccgaccgctgcgccttatccggtaactatcgtcttgagtccaacccggaaagacatgcaaaagcaccactggcagcagccactggtaattgatttagaggagttagtcttgaagtcatgcgccggttaaggctaaactgaaaggacaagttttggtgactgcgctcctccaagccagttacctcggttcaaagagttggtagctcagagaaccttcgaaaaaccgccctgcaaggcggttttttcgttttcagagcaagagattacgcgcagaccaaaacgatctcaagaagatcatcttattaagtctgacgctctattcaacaaagccgccgtccatgggtagggggcttcaaatcgtcctcgtgataccaattcggagcctgcttttttgtacaaacttgttgataatggcaattcaaggatcttcacctagatccttttaaattaaaaatgaagttttaaatcaatctaaagtatatatgagtaaacttggtctgacagttaccaatgcttaatcagtgaggcacctatctcagcgatctgtctatttcgttcatccatagttgcctgactccccgtcgtgtagataactacgatacgggagggcttaccatctggccccagtgctgcaatgataccgcgagagccacgctcaccggctccagatttatcagcaataaaccagccagccggaagggccgagcgcagaagtggtcctgcaactttatccgcctccatccagtctattaattgttgccgggaagctagagtaagtagttcgccagttaatagtttgcgcaacgttgttgccattgctacaggcatcgtggtgtcacgctcgtcgtttggtatggcttcattcagctccggttcccaacgatcaaggcgagttacatgatcccccatgttgtgcaaaaaagcggttagctccttcggtcctccgatcgttgtcagaagtaagttggccgcagtgttatcactcatggttatggcagcactgcataattctcttactgtcatgccatccgtaagatgcttttctgtgactggtgagtactcaaccaagtcattctgagaatagtgtatgcggcgaccgagttgctcttgcccggcgtcaatacgggataataccgcgccacatagcagaactttaaaagtgctcatcattggaaaacgttcttcggggcgaaaactctcaaggatcttaccgctgttgagatccagttcgatgtaacccactcgtgcacccaactgatcttcagcatcttttactttcaccagcgtttctgggtgagcaaaaacaggaaggcaaaatgccgcaaaaaagggaataagggcgacacggaaatgttgaatactcatactcttcctttttcaatattattgaagcatttatcagggttattgtctcatgagcggatacatatttgaatgtatttagaaaaataaacaaataggggttccgcgcacatttccccgaaaagtgccagatacctgaaacaaaacccatcgtacggccaaggaagtctccaataactgtgatccaccacaagcgccagggttttcccagtcacgacgttgtaaaacgacggccagtcatgcataatccgcacgcatctggaataaggaagtgccattccgcctgacctttgcctatgaggaccaaaacgaaaaaacaccctttcgggtgtcttttctggaatttggtaccgagaggctccatgattcagtatgacttgcctttggtcgaaaaaaaaagcccgcactgtcaggtgcgggcttttttctgtgtttccttattaggacccactttcacatttaagttgtttttctaatccgcatatgatcaattcaaggccgaataagaaggctggctctgcaccttggtgatcaaataattcgatagcttgtcgtaataatggcggcatactatcagtagtaggtgtttccctttcttctttagcgacttgatgctcttgatcttccaatacgcaacctaaagtaaaatgccccacagcgctgagtgcatataatgcattctctagtgaaaaaccttgttggcataaaaaggctaattgattttcgagagtttcatactgtttttctgtaggccgtgtacctaaatgtacttttgctccatcgcgatgacttagtaaagcacatctaaaacttttagcgttattacgtaaaaaatcttgccagctttccccttctaaagggcaaaagtgagtatggtgcctatctaacatctcaatggctaaggcgtcgagcaaagcccgcttattttttacatgccaatacaatgtaggctgctctacacctagcttctgggcgagtttacgggttgttaaaccttcgattccgacctcattaagcagctctaatgcgctgttaatcactttacttttatctaatctggacatattcaccaccctgaattgactctcttccgggcgctatcatgccataccgcgaaaggttttgcgccattcgatggcgcgccgccattgcttgtgcaatgtacatcagagattttgagacacaaccaattattgaaggcctccctaacggggggcctttttttgtttctggtcccccgcttaacgatcgttggctgttttcagcaggacgcactgacctccctatcagtgatagagattgacatccctatcagtgatagagatactgagcacagctgtcaccggatgtgctttccggtctgatgagtccgtgaggacgaaacagcctctacaaataattttgtttaaatcacacgggtaaggaggtatttaaatgaaaacactgtcccaagcacagtcgaagacgagtagccagcagttttctttcaccggtaattctagcgctaacgtgattatcggcaaccagaaactaactatcaacgacgtcgcccgcgttgctcggaacgggaccttagtaagcctgactaacaacactgatatacttcaaggcattcaggcgtcctgtgattatatcaataacgcagttgagtctggtgaaccaatttacggtgtgacctcaggcttcggcggtatggcgaacgttgctatcagccgtgaacaggcctccgaactgcaaaccaatgcagtatggcatacgaaaactggtgctgggaacaaactccctttggcggacgtacgtgcagcaatgctgctgcgcgccaactcgcatatgcgtggcgcgtccggtatccgtctggagctgatcaaacgtatggaaatcttcttgaacgctggtgttactccgtacgtttatgaatttggatctatcggcgcttctggagatctggtcccgctgagctacattacgggttccctgattggccttgacccgagcttcaaggtggatttcaacggcaaagaaatggacgccccgaccgcgttacgccagttaaatctgtctcccctgacacttctgcctaaagaagccctagctatgattaatgggacctcagtcatgactggcatcgcagctaactgcgtatacgacacccagatcctgactgcgattgcaatgggtgttcacgctctggatatccaggccctgaacggcaccaaccagtctttccacccgtttatccataactctaagccgcacccaggtcagctgtgggcggctgatcagatgatatcattgctggctaactcgcaactggtacgggacgagctggacggcaaacatgattaccgcgaccacgagctgatccaggatcgttatagcctgcgttgccttccgcagtacctgggtccgattgtggacggtatctcacagatagcaaaacaaatcgaaattgaaattaactccgttactgataaccctctgattgacgtcgataaccaggcgtcgtaccacggcggaaatttcctgggtcagtatgttggcatgggtatggaccaccttcgctactatatcggcctgctggcgaaacacctggatgtgcagattgcgctgctagctagtcccgaatttagcaacggactgccgccatctttattgggcaaccgtgaacgtaaggttaacatgggtctgaaaggtttacaaatctgtggcaattccatcatgccgctgctgacgttctacggcaatagcatcgccgaccgctttccgacccatgcagagcaattcaaccagaatatcaactctcagggctacacctccgcaacgctggcgcgacgtagtgttgatatcttccaaaactacgttgcgattgccctgatgtttggcgtccaggctgtagacctgaggacttataaaaagactggccattacgatgcgcgtgcttgcctctctccggctaccgaacgcctgtattccgccgtgcgtcacgtagttggtcagaaacctacttcagatcgcccatacatctggaacgataacgagcagggtctggatgaacacatcgctcgcatctccgctgacattgccgctggcggagtaattgttcaagctgtacaggatatcctgccgtgcctgcactaaccggcttatcggtcagtttcacctgatttacgtaaaaacccgcttcggcgggtttttgcttttggaggggcagaaagatgaatgactgtccacgacgctatacccaaaagaaa

SEQ ID NO: 364 - DNA, 5122 bp, synthetic construct
  source 1..5122: mol_type = other DNA
aggctaggtggaggctcagtgatgataagtctgcgatggtggatgcatgtgtcatggtcatagctgtttcctgtgtgaaattgttatccgctcagagggcacaatcctattccgcgctatccgacaatctccaagacattaggtggagttcagttcggcgagcggaaatggcttacgaacggggcggagatttcctggaagatgccaggaagatacttaacagggaagtgagagggccgcggcaaagccgtttttccataggctccgcccccctgacaagcatcacgaaatctgacgctcaaatcagtggtggcgaaacccgacaggactataaagataccaggcgtttccccctggcggctccctcgtgcgctctcctgttcctgcctttcggtttaccggtgtcattccgctgttatggccgcgtttgtctcattccacgcctgacactcagttccgggtaggcagttcgctccaagctggactgtatgcacgaaccccccgttcagtccgaccgctgcgccttatccggtaactatcgtcttgagtccaacccggaaagacatgcaaaagcaccactggcagcagccactggtaattgatttagaggagttagtcttgaagtcatgcgccggttaaggctaaactgaaaggacaagttttggtgactgcgctcctccaagccagttacctcggttcaaagagttggtagctcagagaaccttcgaaaaaccgccctgcaaggcggttttttcgttttcagagcaagagattacgcgcagaccaaaacgatctcaagaagatcatcttattaagtctgacgctctattcaacaaagccgccgtccatgggtagggggcttcaaatcgtcctcgtgataccaattcggagcctgcttttttgtacaaacttgttgataatggcaattcaaggatcttcacctagatccttttaaattaaaaatgaagttttaaatcaatctaaagtatatatgagtaaacttggtctgacagttaccaatgcttaatcagtgaggcacctatctcagcgatctgtctatttcgttcatccatagttgcctgactccccgtcgtgtagataactacgatacgggagggcttaccatctggccccagtgctgcaatgataccgcgagagccacgctcaccggctccagatttatcagcaataaaccagccagccggaagggccgagcgcagaagtggtcctgcaactttatccgcctccatccagtctattaattgttgccgggaagctagagtaagtagttcgccagttaatagtttgcgcaacgttgttgccattgctacaggcatcgtggtgtcacgctcgtcgtttggtatggcttcattcagctccggttcccaacgatcaaggcgagttacatgatcccccatgttgtgcaaaaaagcggttagctccttcggtcctccgatcgttgtcagaagtaagttggccgcagtgttatcactcatggttatggcagcactgcataattctcttactgtcatgccatccgtaagatgcttttctgtgactggtgagtactcaaccaagtcattctgagaatagtgtatgcggcgaccgagttgctcttgcccggcgtcaatacgggataataccgcgccacatagcagaactttaaaagtgctcatcattggaaaacgttcttcggggcgaaaactctcaaggatcttaccgctgttgagatccagttcgatgtaacccactcgtgcacccaactgatcttcagcatcttttactttcaccagcgtttctgggtgagcaaaaacaggaaggcaaaatgccgcaaaaaagggaataagggcgacacggaaatgttgaatactcatactcttcctttttcaatattattgaagcatttatcagggttattgtctcatgagcggatacatatttgaatgtatttagaaaaataaacaaataggggttccgcgcacatttccccgaaaagtgccagatacctgaaacaaaacccatcgtacggccaaggaagtctccaataactgtgatccaccacaagcgccagggttttcccagtcacgacgttgtaaaacgacggccagtcatgcataatccgcacgcatctggaataaggaagtgccattccgcctgacctttgcctatgaggaccaaaacgaaaaaacaccctttcgggtgtcttttctggaatttggtaccgagaggctccatgattcagtatgacttgcctttggtcgaaaaaaaaagcccgcactgtcaggtgcgggcttttttctgtgtttccttattaggacccactttcacatttaagttgtttttctaatccgcatatgatcaattcaaggccgaataagaaggctggctctgcaccttggtgatcaaataattcgatagcttgtcgtaataatggcggcatactatcagtagtaggtgtttccctttcttctttagcgacttgatgctcttgatcttccaatacgcaacctaaagtaaaatgccccacagcgctgagtgcatataatgcattctctagtgaaaaaccttgttggcataaaaaggctaattgattttcgagagtttcatactgtttttctgtaggccgtgtacctaaatgtacttttgctccatcgcgatgacttagtaaagcacatctaaaacttttagcgttattacgtaaaaaatcttgccagctttccccttctaaagggcaaaagtgagtatggtgcctatctaacatctcaatggctaaggcgtcgagcaaagcccgcttattttttacatgccaatacaatgtaggctgctctacacctagcttctgggcgagtttacgggttgttaaaccttcgattccgacctcattaagcagctctaatgcgctgttaatcactttacttttatctaatctggacatattcaccaccctgaattgactctcttccgggcgctatcatgccataccgcgaaaggttttgcgccattcgatggcgcgccgccattgcttgtgcaatgtacatcagagattttgagacacaaccaattattgaaggcctccctaacggggggcctttttttgtttctggtcccccgcttaacgatcgttggctgttttcagcaggacgcactgacctccctatcagtgatagagattgacatccctatcagtgatagagatactgagcacagctgtcaccggatgtgctttccggtctgatgagtccgtgaggacgaaacagcctctacaaataattttgtttaaatcacacgggtaaggaggtatttaaatgaaaacactgtcccaagcacagtcgaagacgagtagccagcagttttctttcaccggtaattctagcgctaacgtgattatcggcaaccagaaactaactatcaacgacgtcgcccgcgttgctcggaacgggaccttagtaagcctgactaacaacactgatatacttcaaggcattcaggcgtcctgtgattatatcaataacgcagttgagtctggtgaaccaatttacggtgtgacctcaggcttcggcggtatggcgaacgttgctatcagccgtgaacaggcctccgaactgcaagagaatattgtatggcacgtcaaaactggtgctgggaacaaactccctttggcggacgtacgtgcagcaatgctgctgcgcgccaactcgcatatgcgtggcgcgtccggtatccgtctggagctgatcaaacgtatggaaatcttcttgaacgctggtgttactccgtacgtttatgaatttggatctatcggcgcttctggagatctggtcccgctgagctacattacgggttccctgattggccttgacccgagcttcaaggtggatttcaacggcaaagaaatggacgccccgaccgcgttacgccagttaaatctgtctcccctgacacttctgcctaaagaaggtctagctatgattaatgggacctcagtcatgactggcatcgcagctaactgcgtatacgacacccagatcctgactgcgattgcaatgggtgttcacgctctggatatccaggccctgaacggcaccaaccagtctttccacccgtttatccataactctaagccgcacccaggtcagctgtgggcggctgatcagatgatatcattgctggctaactcgcaactggtacgggacgagctggacggcaaacatgattaccgcgaccacgagctgatccaggatcgttatagcctgcgttgccttccgcagtacctgggtccgattgtggacggtatctcacagatagcaaaacaaatcgaaattgaaattaactccgttactgataaccctctgattgacgtcgataaccaggcgtcgtaccacggcggaaatttcctgggtcagtatgttggcatgggtatggaccaccttcgctactatatcggcctgctggcgaaacacctggatgtgcagattgcgctgctagctagtcccgaatttagcaacggactgccgccatctttattgggcaaccgtgaacgtaaggttaacatgggtctgaaaggtttacaaatctgtggcaattccatcatgccgctgctgacgttctacggcaatagcatcgccgaccgctttccgacccatgcagagcaattcaaccagaatatcaactctcagggctacacctccgcaacgctggcgcgacgtagtgttgatatcttccaaaactacgttgcgattgccctgatgtttggcgtccaggctgtagacctgaggacttataaaaagactggccattacgatgcgcgtgcttgcctctctccggctaccgaacgcctgtattccgccgtgcgtcacgtagttggtcagaaacctacttcagatcgcccatacatctggaacgataacgagcagggtctggatgaacacatcgctcgcatctccgctgacattgccgctggcggagtaattgttcaagctgtacaggatatcctgccgtgcctgcactaaccggcttatcggtcagtttcacctgatttacgtaaaaacccgcttcggcgggtttttgcttttggaggggcagaaagatgaatgactgtccacgacgctatacccaaaagaaa

SEQ ID NO: 365 - DNA, 5122 bp, synthetic construct
  source 1..5122: mol_type = other DNA
aggctaggtggaggctcagtgatgataagtctgcgatggtggatgcatgtgtcatggtcatagctgtttcctgtgtgaaattgttatccgctcagagggcacaatcctattccgcgctatccgacaatctccaagacattaggtggagttcagttcggcgagcggaaatggcttacgaacggggcggagatttcctggaagatgccaggaagatacttaacagggaagtgagagggccgcggcaaagccgtttttccataggctccgcccccctgacaagcatcacgaaatctgacgctcaaatcagtggtggcgaaacccgacaggactataaagataccaggcgtttccccctggcggctccctcgtgcgctctcctgttcctgcctttcggtttaccggtgtcattccgctgttatggccgcgtttgtctcattccacgcctgacactcagttccgggtaggcagttcgctccaagctggactgtatgcacgaaccccccgttcagtccgaccgctgcgccttatccggtaactatcgtcttgagtccaacccggaaagacatgcaaaagcaccactggcagcagccactggtaattgatttagaggagttagtcttgaagtcatgcgccggttaaggctaaactgaaaggacaagttttggtgactgcgctcctccaagccagttacctcggttcaaagagttggtagctcagagaaccttcgaaaaaccgccctgcaaggcggttttttcgttttcagagcaagagattacgcgcagaccaaaacgatctcaagaagatcatcttattaagtctgacgctctattcaacaaagccgccgtccatgggtagggggcttcaaatcgtcctcgtgataccaattcggagcctgcttttttgtacaaacttgttgataatggcaattcaaggatcttcacctagatccttttaaattaaaaatgaagttttaaatcaatctaaagtatatatgagtaaacttggtctgacagttaccaatgcttaatcagtgaggcacctatctcagcgatctgtctatttcgttcatccatagttgcctgactccccgtcgtgtagataactacgatacgggagggcttaccatctggccccagtgctgcaatgataccgcgagagccacgctcaccggctccagatttatcagcaataaaccagccagccggaagggccgagcgcagaagtggtcctgcaactttatccgcctccatccagtctattaattgttgccgggaagctagagtaagtagttcgccagttaatagtttgcgcaacgttgttgccattgctacaggcatcgtggtgtcacgctcgtcgtttggtatggcttcattcagctccggttcccaacgatcaaggcgagttacatgatcccccatgttgtgcaaaaaagcggttagctccttcggtcctccgatcgttgtcagaagtaagttggccgcagtgttatcactcatggttatggcagcactgcataattctcttactgtcatgccatccgtaagatgcttttctgtgactggtgagtactcaaccaagtcattctgagaatagtgtatgcggcgaccgagttgctcttgcccggcgtcaatacgggataataccgcgccacatagcagaactttaaaagtgctcatcattggaaaacgttcttcggggcgaaaactctcaaggatcttaccgctgttgagatccagttcgatgtaacccactcgtgcacccaactgatcttcagcatcttttactttcaccagcgtttctgggtgagcaaaaacaggaaggcaaaatgccgcaaaaaagggaataagggcgacacggaaatgttgaatactcatactcttcctttttcaatattattgaagcatttatcagggttattgtctcatgagcggatacatatttgaatgtatttagaaaaataaacaaataggggttccgcgcacatttccccgaaaagtgccagatacctgaaacaaaacccatcgtacggccaaggaagtctccaataactgtgatccaccacaagcgccagggttttcccagtcacgacgttgtaaaacgacggccagtcatgcataatccgcacgcatctggaataaggaagtgccattccgcctgacctttgcctatgaggaccaaaacgaaaaaacaccctttcgggtgtcttttctggaatttggtaccgagaggctccatgattcagtatgacttgcctttggtcgaaaaaaaaagcccgcactgtcaggtgcgggcttttttctgtgtttccttattaggacccactttcacatttaagttgtttttctaatccgcatatgatcaattcaaggccgaataagaaggctggctctgcaccttggtgatcaaataattcgatagcttgtcgtaataatggcggcatactatcagtagtaggtgtttccctttcttctttagcgacttgatgctcttgatcttccaatacgcaacctaaagtaaaatgccccacagcgctgagtgcatataatgcattctctagtgaaaaaccttgttggcataaaaaggctaattgattttcgagagtttcatactgtttttctgtaggccgtgtacctaaatgtacttttgctccatcgcgatgacttagtaaagcacatctaaaacttttagcgttattacgtaaaaaatcttgccagctttccccttctaaagggcaaaagtgagtatggtgcctatctaacatctcaatggctaaggcgtcgagcaaagcccgcttattttttacatgccaatacaatgtaggctgctctacacctagcttctgggcgagtttacgggttgttaaaccttcgattccgacctcattaagcagctctaatgcgctgttaatcactttacttttatctaatctggacatattcaccaccctgaattgactctcttccgggcgctatcatgccataccgcgaaaggttttgcgccattcgatggcgcgccgccattgcttgtgcaatgtacatcagagattttgagacacaaccaattattgaaggcctccctaacggggggcctttttttgtttctggtcccccgcttaacgatcgttggctgttttcagcaggacgcactgacctccctatcagtgatagagattgacatccctatcagtgatagagatactgagcacagctgtcaccggatgtgctttccggtctgatgagtccgtgaggacgaaacagcctctacaaataattttgtttaaatcacacgggtaaggaggtatttaaatgaaaacactgtcccaagcacagtcgaagacgagtagccagcagttttctttcaccggtaattctagcgctaacgtgattatcggcaaccagaaactaactatcaacgacgtcgcccgcgttgctcggaacgggaccttagtaagcctgactaacaacactgatatacttcaaggcattcaggcgtcctgtgattatatcaataacgcagttgagtctggtgaaccaatttacggtgtgacctcaggcttcggcggtatggcgaacgttgctatcagccgtgaacaggcctccgaactgcaaaccaatgtcgtatggtttcacaaaactggtgctgggaacaaactccctttggcggacgtacgtgcagcaatgctgctgcgcgccaactcgcatatgcgtggcgcgtccggtatccgtctggagctgatcaaacgtatggaaatcttcttgaacgctggtgttactccgtacgtttatgaatttggatctatcggcgcttctggagatctggtcccgctgagctacattacgggttccctgattggccttgacccgagcttcaaggtggatttcaacggcaaagaaatggacgccccgaccgcgttacgccagttaaatctgtctcccctgacacttctgcctaaagaaggtattgctatgattaatgggacctcagtcatgactggcatcgcagctaactgcgtatacgacacccagatcctgactgcgattgcaatgggtgttcacgctctggatatccaggccctgaacggcaccaaccagtctttccacccgtttatccataactctaagccgcacccaggtcagctgtgggcggctgatcagatgatatcattgctggctaactcgcaactggtacgggacgagctggacggcaaacatgattaccgcgaccacgagctgatccaggatcgttatagcctgcgttgccttccgcagtacctgggtccgattgtggacggtatctcacagatagcaaaacaaatcgaaattgaaattaactccgttactgataaccctctgattgacgtcgataaccaggcgtcgtaccacggcggaaatttcctgggtcagtatgttggcatgggtatggaccaccttcgctactatatcggcctgctggcgaaacacctggatgtgcagattgcgctgctagctagtcccgaatttagcaacggactgccgccatctttattgggcaaccgtgaacgtaaggttaacatgggtctgaaaggtttacaaatctgtggcaattccatcatgccgctgctgacgttctacggcaatagcatcgccgaccgctttccgacccatgcagagcaattcaaccagaatatcaactctcagggctacacctccgcaacgctggcgcgacgtagtgttgatatcttccaaaactacgttgcgattgccctgatgtttggcgtccaggctgtagacctgaggacttataaaaagactggccattacgatgcgcgtgcttgcctctctccggctaccgaacgcctgtattccgccgtgcgtcacgtagttggtcagaaacctacttcagatcgcccatacatctggaacgataacgagcagggtctggatgaacacatcgctcgcatctccgctgacattgccgctggcggagtaattgttcaagctgtacaggatatcctgccgtgcctgcactaaccggcttatcggtcagtttcacctgatttacgtaaaaacccgcttcggcgggtttttgcttttggaggggcagaaagatgaatgactgtccacgacgctatacccaaaagaaa

SEQ ID NO: 366 - DNA, 5122 bp, synthetic construct
  source 1..5122: mol_type = other DNA
aggctaggtggaggctcagtgatgataagtctgcgatggtggatgcatgtgtcatggtcatagctgtttcctgtgtgaaattgttatccgctcagagggcacaatcctattccgcgctatccgacaatctccaagacattaggtggagttcagttcggcgagcggaaatggcttacgaacggggcggagatttcctggaagatgccaggaagatacttaacagggaagtgagagggccgcggcaaagccgtttttccataggctccgcccccctgacaagcatcacgaaatctgacgctcaaatcagtggtggcgaaacccgacaggactataaagataccaggcgtttccccctggcggctccctcgtgcgctctcctgttcctgcctttcggtttaccggtgtcattccgctgttatggccgcgtttgtctcattccacgcctgacactcagttccgggtaggcagttcgctccaagctggactgtatgcacgaaccccccgttcagtccgaccgctgcgccttatccggtaactatcgtcttgagtccaacccggaaagacatgcaaaagcaccactggcagcagccactggtaattgatttagaggagttagtcttgaagtcatgcgccggttaaggctaaactgaaaggacaagttttggtgactgcgctcctccaagccagttacctcggttcaaagagttggtagctcagagaaccttcgaaaaaccgccctgcaaggcggttttttcgttttcagagcaagagattacgcgcagaccaaaacgatctcaagaagatcatcttattaagtctgacgctctattcaacaaagccgccgtccatgggtagggggcttcaaatcgtcctcgtgataccaattcggagcctgcttttttgtacaaacttgttgataatggcaattcaaggatcttcacctagatccttttaaattaaaaatgaagttttaaatcaatctaaagtatatatgagtaaacttggtctgacagttaccaatgcttaatcagtgaggcacctatctcagcgatctgtctatttcgttcatccatagttgcctgactccccgtcgtgtagataactacgatacgggagggcttaccatctggccccagtgctgcaatgataccgcgagagccacgctcaccggctccagatttatcagcaataaaccagccagccggaagggccgagcgcagaagtggtcctgcaactttatccgcctccatccagtctattaattgttgccgggaagctagagtaagtagttcgccagttaatagtttgcgcaacgttgttgccattgctacaggcatcgtggtgtcacgctcgtcgtttggtatggcttcattcagctccggttcccaacgatcaaggcgagttacatgatcccccatgttgtgcaaaaaagcggttagctccttcggtcctccgatcgttgtcagaagtaagttggccgcagtgttatcactcatggttatggcagcactgcataattctcttactgtcatgccatccgtaagatgcttttctgtgactggtgagtactcaaccaagtcattctgagaatagtgtatgcggcgaccgagttgctcttgcccggcgtcaatacgggataataccgcgccacatagcagaactttaaaagtgctcatcattggaaaacgttcttcggggcgaaaactctcaaggatcttaccgctgttgagatccagttcgatgtaacccactcgtgcacccaactgatcttcagcatcttttactttcaccagcgtttctgggtgagcaaaaacaggaaggcaaaatgccgcaaaaaagggaataagggcgacacggaaatgttgaatactcatactcttcctttttcaatattattgaagcatttatcagggttattgtctcatgagcggatacatatttgaatgtatttagaaaaataaacaaataggggttccgcgcacatttccccgaaaagtgccagatacctgaaacaaaacccatcgtacggccaaggaagtctccaataactgtgatccaccacaagcgccagggttttcccagtcacgacgttgtaaaacgacggccagtcatgcataatccgcacgcatctggaataaggaagtgccattccgcctgacctttgcctatgaggaccaaaacgaaaaaacaccctttcgggtgtcttttctggaatttggtaccgagaggctccatgattcagtatgacttgcctttggtcgaaaaaaaaagcccgcactgtcaggtgcgggcttttttctgtgtttccttattaggacccactttcacatttaagttgtttttctaatccgcatatgatcaattcaaggccgaataagaaggctggctctgcaccttggtgatcaaataattcgatagcttgtcgtaataatggcggcatactatcagtagtaggtgtttccctttcttctttagcgacttgatgctcttgatcttccaatacgcaacctaaagtaaaatgccccacagcgctgagtgcatataatgcattctctagtgaaaaaccttgttggcataaaaaggctaattgattttcgagagtttcatactgtttttctgtaggccgtgtacctaaatgtacttttgctccatcgcgatgacttagtaaagcacatctaaaacttttagcgttattacgtaaaaaatcttgccagctttccccttctaaagggcaaaagtgagtatggtgcctatctaacatctcaatggctaaggcgtcgagcaaagcccgcttattttttacatgccaatacaatgtaggctgctctacacctagcttctgggcgagtttacgggttgttaaaccttcgattccgacctcattaagcagctctaatgcgctgttaatcactttacttttatctaatctggacatattcaccaccctgaattgactctcttccgggcgctatcatgccataccgcgaaaggttttgcgccattcgatggcgcgccgccattgcttgtgcaatgtacatcagagattttgagacacaaccaattattgaaggcctccctaacggggggcctttttttgtttctggtcccccgcttaacgatcgttggctgttttcagcaggacgcactgacctccctatcagtgatagagattgacatccctatcagtgatagagatactgagcacagctgtcaccggatgtgctttccggtctgatgagtccgtgaggacgaaacagcctctacaaataattttgtttaaatcacacgggtaaggaggtatttaaatgaaaacactgtcccaagcacagtcgaagacgagtagccagcagttttctttcaccggtaattctagcgctaacgtgattatcggcaaccagaaactaactatcaacgacgtcgcccgcgttgctcggaacgggaccttagtaagcctgactaacaacactgatatacttcaaggcattcaggcgtcctgtgattatatcaataacgcagttgagtctggtgaaccaatttacggtgtgacctcaggcttcggcggtatggcgaacgttgctatcagccgtgaacaggcctccgaactgcaagagaatgtcgtatggcatctgaaaactggtgctgggaacaaactccctttggcggacgtacgtgcagcaatgctgctgcgcgccaactcgcatatgcgtggcgcgtccggtatccgtctggagctgatcaaacgtatggaaatcttcttgaacgctggtgttactccgtacgtttatgaatttggatctatcggcgcttctggagatctggtcccgctgagctacattacgggttccctgattggccttgacccgagcttcaaggtggatttcaacggcaaagaaatggacgccccgaccgcgttacgccagttaaatctgtctcccctgacacttctgcctaaagaaggtctagctatgattaatgggacctcagtcatgactggcatcgcagctaactgcgtatacgacacccagatcctgactgcgattgcaatgggtgttcacgctctggatatccaggccctgaacggcaccaaccagtctttccacccgtttatccataactctaagccgcacccaggtcagctgtgggcggctgatcagatgatatcattgctggctaactcgcaactggtacgggacgagctggacggcaaacatgattaccgcgaccacgagctgatccaggatcgttatagcctgcgttgccttccgcagtacctgggtccgattgtggacggtatctcacagatagcaaaacaaatcgaaattgaaattaactccgttactgataaccctctgattgacgtcgataaccaggcgtcgtaccacggcggaaatttcctgggtcagtatgttggcatgggtatggaccaccttcgctactatatcggcctgctggcgaaacacctggatgtgcagattgcgctgctagctagtcccgaatttagcaacggactgccgccatctttattgggcaaccgtgaacgtaaggttaacatgggtctgaaaggtttacaaatctgtggcaattccatcatgccgctgctgacgttctacggcaatagcatcgccgaccgctttccgacccatgcagagcaattcaaccagaatatcaactctcagggctacacctccgcaacgctggcgcgacgtagtgttgatatcttccaaaactacgttgcgattgccctgatgtttggcgtccaggctgtagacctgaggacttataaaaagactggccattacgatgcgcgtgcttgcctctctccggctaccgaacgcctgtattccgccgtgcgtcacgtagttggtcagaaacctacttcagatcgcccatacatctggaacgataacgagcagggtctggatgaacacatcgctcgcatctccgctgacattgccgctggcggagtaattgttcaagctgtacaggatatcctgccgtgcctgcactaaccggcttatcggtcagtttcacctgatttacgtaaaaacccgcttcggcgggtttttgcttttggaggggcagaaagatgaatgactgtccacgacgctatacccaaaagaaa

SEQ ID NO: 367 - DNA, 5122 bp, synthetic construct
  source 1..5122: mol_type = other DNA
aggctaggtggaggctcagtgatgataagtctgcgatggtggatgcatgtgtcatggtcatagctgtttcctgtgtgaaattgttatccgctcagagggcacaatcctattccgcgctatccgacaatctccaagacattaggtggagttcagttcggcgagcggaaatggcttacgaacggggcggagatttcctggaagatgccaggaagatacttaacagggaagtgagagggccgcggcaaagccgtttttccataggctccgcccccctgacaagcatcacgaaatctgacgctcaaatcagtggtggcgaaacccgacaggactataaagataccaggcgtttccccctggcggctccctcgtgcgctctcctgttcctgcctttcggtttaccggtgtcattccgctgttatggccgcgtttgtctcattccacgcctgacactcagttccgggtaggcagttcgctccaagctggactgtatgcacgaaccccccgttcagtccgaccgctgcgccttatccggtaactatcgtcttgagtccaacccggaaagacatgcaaaagcaccactggcagcagccactggtaattgatttagaggagttagtcttgaagtcatgcgccggttaaggctaaactgaaaggacaagttttggtgactgcgctcctccaagccagttacctcggttcaaagagttggtagctcagagaaccttcgaaaaaccgccctgcaaggcggttttttcgttttcagagcaagagattacgcgcagaccaaaacgatctcaagaagatcatcttattaagtctgacgctctattcaacaaagccgccgtccatgggtagggggcttcaaatcgtcctcgtgataccaattcggagcctgcttttttgtacaaacttgttgataatggcaattcaaggatcttcacctagatccttttaaattaaaaatgaagttttaaatcaatctaaagtatatatgagtaaacttggtctgacagttaccaatgcttaatcagtgaggcacctatctcagcgatctgtctatttcgttcatccatagttgcctgactccccgtcgtgtagataactacgatacgggagggcttaccatctggccccagtgctgcaatgataccgcgagagccacgctcaccggctccagatttatcagcaataaaccagccagccggaagggccgagcgcagaagtggtcctgcaactttatccgcctccatccagtctattaattgttgccgggaagctagagtaagtagttcgccagttaatagtttgcgcaacgttgttgccattgctacaggcatcgtggtgtcacgctcgtcgtttggtatggcttcattcagctccggttcccaacgatcaaggcgagttacatgatcccccatgttgtgcaaaaaagcggttagctccttcggtcctccgatcgttgtcagaagtaagttggccgcagtgttatcactcatggttatggcagcactgcataattctcttactgtcatgccatccgtaagatgcttttctgtgactggtgagtactcaaccaagtcattctgagaatagtgtatgcggcgaccgagttgctcttgcccggcgtcaatacgggataataccgcgccacatagcagaactttaaaagtgctcatcattggaaaacgttcttcggggcgaaaactctcaaggatcttaccgctgttgagatccagttcgatgtaacccactcgtgcacccaactgatcttcagcatcttttactttcaccagcgtttctgggtgagcaaaaacaggaaggcaaaatgccgcaaaaaagggaataagggcgacacggaaatgttgaatactcatactcttcctttttcaatattattgaagcatttatcagggttattgtctcatgagcggatacatatttgaatgtatttagaaaaataaacaaataggggttccgcgcacatttccccgaaaagtgccagatacctgaaacaaaacccatcgtacggccaaggaagtctccaataactgtgatccaccacaagcgccagggttttcccagtcacgacgttgtaaaacgacggccagtcatgcataatccgcacgcatctggaataaggaagtgccattccgcctgacctttgcctatgaggaccaaaacgaaaaaacaccctttcgggtgtcttttctggaatttggtaccgagaggctccatgattcagtatgacttgcctttggtcgaaaaaaaaagcccgcactgtcaggtgcgggcttttttctgtgtttccttattaggacccactttcacatttaagttgtttttctaatccgcatatgatcaattcaaggccgaataagaaggctggctctgcaccttggtgatcaaataattcgatagcttgtcgtaataatggcggcatactatcagtagtaggtgtttccctttcttctttagcgacttgatgctcttgatcttccaatacgcaacctaaagtaaaatgccccacagcgctgagtgcatataatgcattctctagtgaaaaaccttgttggcataaaaaggctaattgattttcgagagtttcatactgtttttctgtaggccgtgtacctaaatgtacttttgctccatcgcgatgacttagtaaagcacatctaaaacttttagcgttattacgtaaaaaatcttgccagctttccccttctaaagggcaaaagtgagtatggtgcctatctaacatctcaatggctaaggcgtcgagcaaagcccgcttattttttacatgccaatacaatgtaggctgctctacacctagcttctgggcgagtttacgggttgttaaaccttcgattccgacctcattaagcagctctaatgcgctgttaatcactttacttttatctaatctggacatattcaccaccctgaattgactctcttccgggcgctatcatgccataccgcgaaaggttttgcgccattcgatggcgcgccgccattgcttgtgcaatgtacatcagagattttgagacacaaccaattattgaaggcctccctaacggggggcctttttttgtttctggtcccccgcttaacgatcgttggctgttttcagcaggacgcactgacctccctatcagtgatagagattgacatccctatcagtgatagagatactgagcacagctgtcaccggatgtgctttccggtctgatgagtccgtgaggacgaaacagcctctacaaataattttgtttaaatcacacgggtaaggaggtatttaaatgaaaacactgtcccaagcacagtcgaagacgagtagccagcagttttctttcaccggtaattctagcgctaacgtgattatcggcaaccagaaactaactatcaacgacgtcgcccgcgttgctcggaacgggaccttagtaagcctgactaacaacactgatatacttcaaggcattcaggcgtcctgtgattatatcaataacgcagttgagtctggtgaaccaatttacggtgtgacctcaggcttcggcggtatggcgaacgttgctatcagccgtgaacaggcctccgaactgcaaaccaatttggtatggtttatgaaaactggtgctgggaacaaactccctttggcggacgtacgtgcagcaatgctgctgcgcgccaactcgcatatgcgtggcgcgtccggtatccgtctggagctgatcaaacgtatggaaatcttcttgaacgctggtgttactccgtacgtttatgaatttggatctatcggcgcttctggagatctggtcccgctgagctacattacgggttccctgattggccttgacccgagcttcaaggtggatttcaacggcaaagaaatggacgccccgaccgcgttacgccagttaaatctgtctcccctgacacttctgcctaaagaagcaattgctatggtgaatgggacctcagtcatgactggcatcgcagctaactgcgtatacgacacccagatcctgactgcgattgcaatgggtgttcacgctctggatatccaggccctgaacggcaccaaccagtctttccacccgtttatccataactctaagccgcacccaggtcagctgtgggcggctgatcagatgatatcattgctggctaactcgcaactggtacgggacgagctggacggcaaacatgattaccgcgaccacgagctgatccaggatcgttatagcctgcgttgccttccgcagtacctgggtccgattgtggacggtatctcacagatagcaaaacaaatcgaaattgaaattaactccgttactgataaccctctgattgacgtcgataaccaggcgtcgtaccacggcggaaatttcctgggtcagtatgttggcatgggtatggaccaccttcgctactatatcggcctgctggcgaaacacctggatgtgcagattgcgctgctagctagtcccgaatttagcaacggactgccgccatctttattgggcaaccgtgaacgtaaggttaacatgggtctgaaaggtttacaaatctgtggcaattccatcatgccgctgctgacgttctacggcaatagcatcgccgaccgctttccgacccatgcagagcaattcaaccagaatatcaactctcagggctacacctccgcaacgctggcgcgacgtagtgttgatatcttccaaaactacgttgcgattgccctgatgtttggcgtccaggctgtagacctgaggacttataaaaagactggccattacgatgcgcgtgcttgcctctctccggctaccgaacgcctgtattccgccgtgcgtcacgtagttggtcagaaacctacttcagatcgcccatacatctggaacgataacgagcagggtctggatgaacacatcgctcgcatctccgctgacattgccgctggcggagtaattgttcaagctgtacaggatatcctgccgtgcctgcactaaccggcttatcggtcagtttcacctgatttacgtaaaaacccgcttcggcgggtttttgcttttggaggggcagaaagatgaatgactgtccacgacgctatacccaaaagaaa

SEQ ID NO: 368 - DNA, 5122 bp, synthetic construct
  source 1..5122: mol_type = other DNA
aggctaggtggaggctcagtgatgataagtctgcgatggtggatgcatgtgtcatggtcatagctgtttcctgtgtgaaattgttatccgctcagagggcacaatcctattccgcgctatccgacaatctccaagacattaggtggagttcagttcggcgagcggaaatggcttacgaacggggcggagatttcctggaagatgccaggaagatacttaacagggaagtgagagggccgcggcaaagccgtttttccataggctccgcccccctgacaagcatcacgaaatctgacgctcaaatcagtggtggcgaaacccgacaggactataaagataccaggcgtttccccctggcggctccctcgtgcgctctcctgttcctgcctttcggtttaccggtgtcattccgctgttatggccgcgtttgtctcattccacgcctgacactcagttccgggtaggcagttcgctccaagctggactgtatgcacgaaccccccgttcagtccgaccgctgcgccttatccggtaactatcgtcttgagtccaacccggaaagacatgcaaaagcaccactggcagcagccactggtaattgatttagaggagttagtcttgaagtcatgcgccggttaaggctaaactgaaaggacaagttttggtgactgcgctcctccaagccagttacctcggttcaaagagttggtagctcagagaaccttcgaaaaaccgccctgcaaggcggttttttcgttttcagagcaagagattacgcgcagaccaaaacgatctcaagaagatcatcttattaagtctgacgctctattcaacaaagccgccgtccatgggtagggggcttcaaatcgtcctcgtgataccaattcggagcctgcttttttgtacaaacttgttgataatggcaattcaaggatcttcacctagatccttttaaattaaaaatgaagttttaaatcaatctaaagtatatatgagtaaacttggtctgacagttaccaatgcttaatcagtgaggcacctatctcagcgatctgtctatttcgttcatccatagttgcctgactccccgtcgtgtagataactacgatacgggagggcttaccatctggccccagtgctgcaatgataccgcgagagccacgctcaccggctccagatttatcagcaataaaccagccagccggaagggccgagcgcagaagtggtcctgcaactttatccgcctccatccagtctattaattgttgccgggaagctagagtaagtagttcgccagttaatagtttgcgcaacgttgttgccattgctacaggcatcgtggtgtcacgctcgtcgtttggtatggcttcattcagctccggttcccaacgatcaaggcgagttacatgatcccccatgttgtgcaaaaaagcggttagctccttcggtcctccgatcgttgtcagaagtaagttggccgcagtgttatcactcatggttatggcagcactgcataattctcttactgtcatgccatccgtaagatgcttttctgtgactggtgagtactcaaccaagtcattctgagaatagtgtatgcggcgaccgagttgctcttgcccggcgtcaatacgggataataccgcgccacatagcagaactttaaaagtgctcatcattggaaaacgttcttcggggcgaaaactctcaaggatcttaccgctgttgagatccagttcgatgtaacccactcgtgcacccaactgatcttcagcatcttttactttcaccagcgtttctgggtgagcaaaaacaggaaggcaaaatgccgcaaaaaagggaataagggcgacacggaaatgttgaatactcatactcttcctttttcaatattattgaagcatttatcagggttattgtctcatgagcggatacatatttgaatgtatttagaaaaataaacaaataggggttccgcgcacatttccccgaaaagtgccagatacctgaaacaaaacccatcgtacggccaaggaagtctccaataactgtgatccaccacaagcgccagggttttcccagtcacgacgttgtaaaacgacggccagtcatgcataatccgcacgcatctggaataaggaagtgccattccgcctgacctttgcctatgaggaccaaaacgaaaaaacaccctttcgggtgtcttttctggaatttggtaccgagaggctccatgattcagtatgacttgcctttggtcgaaaaaaaaagcccgcactgtcaggtgcgggcttttttctgtgtttccttattaggacccactttcacatttaagttgtttttctaatccgcatatgatcaattcaaggccgaataagaaggctggctctgcaccttggtgatcaaataattcgatagcttgtcgtaataatggcggcatactatcagtagtaggtgtttccctttcttctttagcgacttgatgctcttgatcttccaatacgcaacctaaagtaaaatgccccacagcgctgagtgcatataatgcattctctagtgaaaaaccttgttggcataaaaaggctaattgattttcgagagtttcatactgtttttctgtaggccgtgtacctaaatgtacttttgctccatcgcgatgacttagtaaagcacatctaaaacttttagcgttattacgtaaaaaatcttgccagctttccccttctaaagggcaaaagtgagtatggtgcctatctaacatctcaatggctaaggcgtcgagcaaagcccgcttattttttacatgccaatacaatgtaggctgctctacacctagcttctgggcgagtttacgggttgttaaaccttcgattccgacctcattaagcagctctaatgcgctgttaatcactttacttttatctaatctggacatattcaccaccctgaattgactctcttccgggcgctatcatgccataccgcgaaaggttttgcgccattcgatggcgcgccgccattgcttgtgcaatgtacatcagagattttgagacacaaccaattattgaaggcctccctaacggggggcctttttttgtttctggtcccccgcttaacgatcgttggctgttttcagcaggacgcactgacctccctatcagtgatagagattgacatccctatcagtgatagagatactgagcacagctgtcaccggatgtgctttccggtctgatgagtccgtgaggacgaaacagcctctacaaataattttgtttaaatcacacgggtaaggaggtatttaaatgaaaacactgtcccaagcacagtcgaagacgagtagccagcagttttctttcaccggtaattctagcgctaacgtgattatcggcaaccagaaactaactatcaacgacgtcgcccgcgttgctcggaacgggaccttagtaagcctgactaacaacactgatatacttcaaggcattcaggcgtcctgtgattatatcaataacgcagttgagtctggtgaaccaatttacggtgtgacctcaggcttcggcggtatggcgaacgttgctatcagccgtgaacaggcctccgaactgcaacacaatttggtatggtttatgaaaactggtgctgggaacaaactccctttggcggacgtacgtgcagcaatgctgctgcgcgccaactcgcatatgcgtggcgcgtccggtatccgtctggagctgatcaaacgtatggaaatcttcttgaacgctggtgttactccgtacgtttatgaatttggatctatcggcgcttctggagatctggtcccgctgagctacattacgggttccctgattggccttgacccgagcttcaaggtggatttcaacggcaaagaaatggacgccccgaccgcgttacgccagttaaatctgtctcccctgacacttctgcctaaagaagcgatagctatgctcaatgggacctcagtcatgactggcatcgcagctaactgcgtatacgacacccagatcctgactgcgattgcaatgggtgttcacgctctggatatccaggccctgaacggcaccaaccagtctttccacccgtttatccataactctaagccgcacccaggtcagctgtgggcggctgatcagatgatatcattgctggctaactcgcaactggtacgggacgagctggacggcaaacatgattaccgcgaccacgagctgatccaggatcgttatagcctgcgttgccttccgcagtacctgggtccgattgtggacggtatctcacagatagcaaaacaaatcgaaattgaaattaactccgttactgataaccctctgattgacgtcgataaccaggcgtcgtaccacggcggaaatttcctgggtcagtatgttggcatgggtatggaccaccttcgctactatatcggcctgctggcgaaacacctggatgtgcagattgcgctgctagctagtcccgaatttagcaacggactgccgccatctttattgggcaaccgtgaacgtaaggttaacatgggtctgaaaggtttacaaatctgtggcaattccatcatgccgctgctgacgttctacggcaatagcatcgccgaccgctttccgacccatgcagagcaattcaaccagaatatcaactctcagggctacacctccgcaacgctggcgcgacgtagtgttgatatcttccaaaactacgttgcgattgccctgatgtttggcgtccaggctgtagacctgaggacttataaaaagactggccattacgatgcgcgtgcttgcctctctccggctaccgaacgcctgtattccgccgtgcgtcacgtagttggtcagaaacctacttcagatcgcccatacatctggaacgataacgagcagggtctggatgaacacatcgctcgcatctccgctgacattgccgctggcggagtaattgttcaagctgtacaggatatcctgccgtgcctgcactaaccggcttatcggtcagtttcacctgatttacgtaaaaacccgcttcggcgggtttttgcttttggaggggcagaaagatgaatgactgtccacgacgctatacccaaaagaaa

SEQ ID NO: 369 - DNA, 5122 bp, synthetic construct
  source 1..5122: mol_type = other DNA
aggctaggtggaggctcagtgatgataagtctgcgatggtggatgcatgtgtcatggtcatagctgtttcctgtgtgaaattgttatccgctcagagggcacaatcctattccgcgctatccgacaatctccaagacattaggtggagttcagttcggcgagcggaaatggcttacgaacggggcggagatttcctggaagatgccaggaagatacttaacagggaagtgagagggccgcggcaaagccgtttttccataggctccgcccccctgacaagcatcacgaaatctgacgctcaaatcagtggtggcgaaacccgacaggactataaagataccaggcgtttccccctggcggctccctcgtgcgctctcctgttcctgcctttcggtttaccggtgtcattccgctgttatggccgcgtttgtctcattccacgcctgacactcagttccgggtaggcagttcgctccaagctggactgtatgcacgaaccccccgttcagtccgaccgctgcgccttatccggtaactatcgtcttgagtccaacccggaaagacatgcaaaagcaccactggcagcagccactggtaattgatttagaggagttagtcttgaagtcatgcgccggttaaggctaaactgaaaggacaagttttggtgactgcgctcctccaagccagttacctcggttcaaagagttggtagctcagagaaccttcgaaaaaccgccctgcaaggcggttttttcgttttcagagcaagagattacgcgcagaccaaaacgatctcaagaagatcatcttattaagtctgacgctctattcaacaaagccgccgtccatgggtagggggcttcaaatcgtcctcgtgataccaattcggagcctgcttttttgtacaaacttgttgataatggcaattcaaggatcttcacctagatccttttaaattaaaaatgaagttttaaatcaatctaaagtatatatgagtaaacttggtctgacagttaccaatgcttaatcagtgaggcacctatctcagcgatctgtctatttcgttcatccatagttgcctgactccccgtcgtgtagataactacgatacgggagggcttaccatctggccccagtgctgcaatgataccgcgagagccacgctcaccggctccagatttatcagcaataaaccagccagccggaagggccgagcgcagaagtggtcctgcaactttatccgcctccatccagtctattaattgttgccgggaagctagagtaagtagttcgccagttaatagtttgcgcaacgttgttgccattgctacaggcatcgtggtgtcacgctcgtcgtttggtatggcttcattcagctccggttcccaacgatcaaggcgagttacatgatcccccatgttgtgcaaaaaagcggttagctccttcggtcctccgatcgttgtcagaagtaagttggccgcagtgttatcactcatggttatggcagcactgcataattctcttactgtcatgccatccgtaagatgcttttctgtgactggtgagtactcaaccaagtcattctgagaatagtgtatgcggcgaccgagttgctcttgcccggcgtcaatacgggataataccgcgccacatagcagaactttaaaagtgctcatcattggaaaacgttcttcggggcgaaaactctcaaggatcttaccgctgttgagatccagttcgatgtaacccactcgtgcacccaactgatcttcagcatcttttactttcaccagcgtttctgggtgagcaaaaacaggaaggcaaaatgccgcaaaaaagggaataagggcgacacggaaatgttgaatactcatactcttcctttttcaatattattgaagcatttatcagggttattgtctcatgagcggatacatatttgaatgtatttagaaaaataaacaaataggggttccgcgcacatttccccgaaaagtgccagatacctgaaacaaaacccatcgtacggccaaggaagtctccaataactgtgatccaccacaagcgccagggttttcccagtcacgacgttgtaaaacgacggccagtcatgcataatccgcacgcatctggaataaggaagtgccattccgcctgacctttgcctatgaggaccaaaacgaaaaaacaccctttcgggtgtcttttctggaatttggtaccgagaggctccatgattcagtatgacttgcctttggtcgaaaaaaaaagcccgcactgtcaggtgcgggcttttttctgtgtttccttattaggacccactttcacatttaagttgtttttctaatccgcatatgatcaattcaaggccgaataagaaggctggctctgcaccttggtgatcaaataattcgatagcttgtcgtaataatggcggcatactatcagtagtaggtgtttccctttcttctttagcgacttgatgctcttgatcttccaatacgcaacctaaagtaaaatgccccacagcgctgagtgcatataatgcattctctagtgaaaaaccttgttggcataaaaaggctaattgattttcgagagtttcatactgtttttctgtaggccgtgtacctaaatgtacttttgctccatcgcgatgacttagtaaagcacatctaaaacttttagcgttattacgtaaaaaatcttgccagctttccccttctaaagggcaaaagtgagtatggtgcctatctaacatctcaatggctaaggcgtcgagcaaagcccgcttattttttacatgccaatacaatgtaggctgctctacacctagcttctgggcgagtttacgggttgttaaaccttcgattccgacctcattaagcagctctaatgcgctgttaatcactttacttttatctaatctggacatattcaccaccctgaattgactctcttccgggcgctatcatgccataccgcgaaaggttttgcgccattcgatggcgcgccgccattgcttgtgcaatgtacatcagagattttgagacacaaccaattattgaaggcctccctaacggggggcctttttttgtttctggtcccccgcttaacgatcgttggctgttttcagcaggacgcactgacctccctatcagtgatagagattgacatccctatcagtgatagagatactgagcacagctgtcaccggatgtgctttccggtctgatgagtccgtgaggacgaaacagcctctacaaataattttgtttaaatcacacgggtaaggaggtatttaaatgaaaacactgtcccaagcacagtcgaagacgagtagccagcagttttctttcaccggtaattctagcgctaacgtgattatcggcaaccagaaactaactatcaacgacgtcgcccgcgttgctcggaacgggaccttagtaagcctgactaacaacactgatatacttcaaggcattcaggcgtcctgtgattatatcaataacgcagttgagtctggtgaaccaatttacggtgtgacctcaggcttcggcggtatggcgaacgttgctatcagccgtgaacaggcctccgaactgcaaagtaatatggtatggcacctgaaaactggtgctgggaacaaactccctttggcggacgtacgtgcagcaatgctgctgcgcgccaactcgcatatgcgtggcgcgtccggtatccgtctggagctgatcaaacgtatggaaatcttcttgaacgctggtgttactccgtacgtttatgaatttggatctatcggcgcttctggagatctggtcccgctgagctacattacgggttccctgattggccttgacccgagcttcaaggtggatttcaacggcaaagaaatggacgccccgaccgcgttacgccagttaaatctgtctcccctgacacttctgcctaaagaaggtctagctatgacgaatgggacctcagtcatgactggcatcgcagctaactgcgtatacgacacccagatcctgactgcgattgcaatgggtgttcacgctctggatatccaggccctgaacggcaccaaccagtctttccacccgtttatccataactctaagccgcacccaggtcagctgtgggcggctgatcagatgatatcattgctggctaactcgcaactggtacgggacgagctggacggcaaacatgattaccgcgaccacgagctgatccaggatcgttatagcctgcgttgccttccgcagtacctgggtccgattgtggacggtatctcacagatagcaaaacaaatcgaaattgaaattaactccgttactgataaccctctgattgacgtcgataaccaggcgtcgtaccacggcggaaatttcctgggtcagtatgttggcatgggtatggaccaccttcgctactatatcggcctgctggcgaaacacctggatgtgcagattgcgctgctagctagtcccgaatttagcaacggactgccgccatctttattgggcaaccgtgaacgtaaggttaacatgggtctgaaaggtttacaaatctgtggcaattccatcatgccgctgctgacgttctacggcaatagcatcgccgaccgctttccgacccatgcagagcaattcaaccagaatatcaactctcagggctacacctccgcaacgctggcgcgacgtagtgttgatatcttccaaaactacgttgcgattgccctgatgtttggcgtccaggctgtagacctgaggacttataaaaagactggccattacgatgcgcgtgcttgcctctctccggctaccgaacgcctgtattccgccgtgcgtcacgtagttggtcagaaacctacttcagatcgcccatacatctggaacgataacgagcagggtctggatgaacacatcgctcgcatctccgctgacattgccgctggcggagtaattgttcaagctgtacaggatatcctgccgtgcctgcactaaccggcttatcggtcagtttcacctgatttacgtaaaaacccgcttcggcgggtttttgcttttggaggggcagaaagatgaatgactgtccacgacgctatacccaaaagaaa

SEQ ID NO: 370 - DNA, 5122 bp, synthetic construct
  source 1..5122: mol_type = other DNA
aggctaggtggaggctcagtgatgataagtctgcgatggtggatgcatgtgtcatggtcatagctgtttcctgtgtgaaattgttatccgctcagagggcacaatcctattccgcgctatccgacaatctccaagacattaggtggagttcagttcggcgagcggaaatggcttacgaacggggcggagatttcctggaagatgccaggaagatacttaacagggaagtgagagggccgcggcaaagccgtttttccataggctccgcccccctgacaagcatcacgaaatctgacgctcaaatcagtggtggcgaaacccgacaggactataaagataccaggcgtttccccctggcggctccctcgtgcgctctcctgttcctgcctttcggtttaccggtgtcattccgctgttatggccgcgtttgtctcattccacgcctgacactcagttccgggtaggcagttcgctccaagctggactgtatgcacgaaccccccgttcagtccgaccgctgcgccttatccggtaactatcgtcttgagtccaacccggaaagacatgcaaaagcaccactggcagcagccactggtaattgatttagaggagttagtcttgaagtcatgcgccggttaaggctaaactgaaaggacaagttttggtgactgcgctcctccaagccagttacctcggttcaaagagttggtagctcagagaaccttcgaaaaaccgccctgcaaggcggttttttcgttttcagagcaagagattacgcgcagaccaaaacgatctcaagaagatcatcttattaagtctgacgctctattcaacaaagccgccgtccatgggtagggggcttcaaatcgtcctcgtgataccaattcggagcctgcttttttgtacaaacttgttgataatggcaattcaaggatcttcacctagatccttttaaattaaaaatgaagttttaaatcaatctaaagtatatatgagtaaacttggtctgacagttaccaatgcttaatcagtgaggcacctatctcagcgatctgtctatttcgttcatccatagttgcctgactccccgtcgtgtagataactacgatacgggagggcttaccatctggccccagtgctgcaatgataccgcgagagccacgctcaccggctccagatttatcagcaataaaccagccagccggaagggccgagcgcagaagtggtcctgcaactttatccgcctccatccagtctattaattgttgccgggaagctagagtaagtagttcgccagttaatagtttgcgcaacgttgttgccattgctacaggcatcgtggtgtcacgctcgtcgtttggtatggcttcattcagctccggttcccaacgatcaaggcgagttacatgatcccccatgttgtgcaaaaaagcggttagctccttcggtcctccgatcgttgtcagaagtaagttggccgcagtgttatcactcatggttatggcagcactgcataattctcttactgtcatgccatccgtaagatgcttttctgtgactggtgagtactcaaccaagtcattctgagaatagtgtatgcggcgaccgagttgctcttgcccggcgtcaatacgggataataccgcgccacatagcagaactttaaaagtgctcatcattggaaaacgttcttcggggcgaaaactctcaaggatcttaccgctgttgagatccagttcgatgtaacccactcgtgcacccaactgatcttcagcatcttttactttcaccagcgtttctgggtgagcaaaaacaggaaggcaaaatgccgcaaaaaagggaataagggcgacacggaaatgttgaatactcatactcttcctttttcaatattattgaagcatttatcagggttattgtctcatgagcggatacatatttgaatgtatttagaaaaataaacaaataggggttccgcgcacatttccccgaaaagtgccagatacctgaaacaaaacccatcgtacggccaaggaagtctccaataactgtgatccaccacaagcgccagggttttcccagtcacgacgttgtaaaacgacggccagtcatgcataatccgcacgcatctggaataaggaagtgccattccgcctgacctttgcctatgaggaccaaaacgaaaaaacaccctttcgggtgtcttttctggaatttggtaccgagaggctccatgattcagtatgacttgcctttggtcgaaaaaaaaagcccgcactgtcaggtgcgggcttttttctgtgtttccttattaggacccactttcacatttaagttgtttttctaatccgcatatgatcaattcaaggccgaataagaaggctggctctgcaccttggtgatcaaataattcgatagcttgtcgtaataatggcggcatactatcagtagtaggtgtttccctttcttctttagcgacttgatgctcttgatcttccaatacgcaacctaaagtaaaatgccccacagcgctgagtgcatataatgcattctctagtgaaaaaccttgttggcataaaaaggctaattgattttcgagagtttcatactgtttttctgtaggccgtgtacctaaatgtacttttgctccatcgcgatgacttagtaaagcacatctaaaacttttagcgttattacgtaaaaaatcttgccagctttccccttctaaagggcaaaagtgagtatggtgcctatctaacatctcaatggctaaggcgtcgagcaaagcccgcttattttttacatgccaatacaatgtaggctgctctacacctagcttctgggcgagtttacgggttgttaaaccttcgattccgacctcattaagcagctctaatgcgctgttaatcactttacttttatctaatctggacatattcaccaccctgaattgactctcttccgggcgctatcatgccataccgcgaaaggttttgcgccattcgatggcgcgccgccattgcttgtgcaatgtacatcagagattttgagacacaaccaattattgaaggcctccctaacggggggcctttttttgtttctggtcccccgcttaacgatcgttggctgttttcagcaggacgcactgacctccctatcagtgatagagattgacatccctatcagtgatagagatactgagcacagctgtcaccggatgtgctttccggtctgatgagtccgtgaggacgaaacagcctctacaaataattttgtttaaatcacacgggtaaggaggtatttaaatgaaaacactgtcccaagcacagtcgaagacgagtagccagcagttttctttcaccggtaattctagcgctaacgtgattatcggcaaccagaaactaactatcaacgacgtcgcccgcgttgctcggaacgggaccttagtaagcctgactaacaacactgatatacttcaaggcattcaggcgtcctgtgattatatcaataacgcagttgagtctggtgaaccaatttacggtgtgacctcaggcttcggcggtatggcgaacgttgctatcagccgtgaacaggcctccgaactgcaagagaatgtcgtatggtatcacaaaactggtgctgggaacaaactccctttggcggacgtacgtgcagcaatgctgctgcgcgccaactcgcatatgcgtggcgcgtccggtatccgtctggagctgatcaaacgtatggaaatcttcttgaacgctggtgttactccgtacgtttatgaatttggatctatcggcgcttctggagatctggtcccgctgagctacattacgggttccctgattggccttgacccgagcttcaaggtggatttcaacggcaaagaaatggacgccccgaccgcgttacgccagttaaatctgtctcccctgacacttctgcctaaagaagcgctagctatgattaatgggacctcagtcatgactggcatcgcagctaactgcgtatacgacacccagatcctgactgcgattgcaatgggtgttcacgctctggatatccaggccctgaacggcaccaaccagtctttccacccgtttatccataactctaagccgcacccaggtcagctgtgggcggctgatcagatgatatcattgctggctaactcgcaactggtacgggacgagctggacggcaaacatgattaccgcgaccacgagctgatccaggatcgttatagcctgcgttgccttccgcagtacctgggtccgattgtggacggtatctcacagatagcaaaacaaatcgaaattgaaattaactccgttactgataaccctctgattgacgtcgataaccaggcgtcgtaccacggcggaaatttcctgggtcagtatgttggcatgggtatggaccaccttcgctactatatcggcctgctggcgaaacacctggatgtgcagattgcgctgctagctagtcccgaatttagcaacggactgccgccatctttattgggcaaccgtgaacgtaaggttaacatgggtctgaaaggtttacaaatctgtggcaattccatcatgccgctgctgacgttctacggcaatagcatcgccgaccgctttccgacccatgcagagcaattcaaccagaatatcaactctcagggctacacctccgcaacgctggcgcgacgtagtgttgatatcttccaaaactacgttgcgattgccctgatgtttggcgtccaggctgtagacctgaggacttataaaaagactggccattacgatgcgcgtgcttgcctctctccggctaccgaacgcctgtattccgccgtgcgtcacgtagttggtcagaaacctacttcagatcgcccatacatctggaacgataacgagcagggtctggatgaacacatcgctcgcatctccgctgacattgccgctggcggagtaattgttcaagctgtacaggatatcctgccgtgcctgcactaaccggcttatcggtcagtttcacctgatttacgtaaaaacccgcttcggcgggtttttgcttttggaggggcagaaagatgaatgactgtccacgacgctatacccaaaagaaa

SEQ ID NO: 371 - DNA, 5122 bp, synthetic construct
  source 1..5122: mol_type = other DNA
aggctaggtggaggctcagtgatgataagtctgcgatggtggatgcatgtgtcatggtcatagctgtttcctgtgtgaaattgttatccgctcagagggcacaatcctattccgcgctatccgacaatctccaagacattaggtggagttcagttcggcgagcggaaatggcttacgaacggggcggagatttcctggaagatgccaggaagatacttaacagggaagtgagagggccgcggcaaagccgtttttccataggctccgcccccctgacaagcatcacgaaatctgacgctcaaatcagtggtggcgaaacccgacaggactataaagataccaggcgtttccccctggcggctccctcgtgcgctctcctgttcctgcctttcggtttaccggtgtcattccgctgttatggccgcgtttgtctcattccacgcctgacactcagttccgggtaggcagttcgctccaagctggactgtatgcacgaaccccccgttcagtccgaccgctgcgccttatccggtaactatcgtcttgagtccaacccggaaagacatgcaaaagcaccactggcagcagccactggtaattgatttagaggagttagtcttgaagtcatgcgccggttaaggctaaactgaaaggacaagttttggtgactgcgctcctccaagccagttacctcggttcaaagagttggtagctcagagaaccttcgaaaaaccgccctgcaaggcggttttttcgttttcagagcaagagattacgcgcagaccaaaacgatctcaagaagatcatcttattaagtctgacgctctattcaacaaagccgccgtccatgggtagggggcttcaaatcgtcctcgtgataccaattcggagcctgcttttttgtacaaacttgttgataatggcaattcaaggatcttcacctagatccttttaaattaaaaatgaagttttaaatcaatctaaagtatatatgagtaaacttggtctgacagttaccaatgcttaatcagtgaggcacctatctcagcgatctgtctatttcgttcatccatagttgcctgactccccgtcgtgtagataactacgatacgggagggcttaccatctggccccagtgctgcaatgataccgcgagagccacgctcaccggctccagatttatcagcaataaaccagccagccggaagggccgagcgcagaagtggtcctgcaactttatccgcctccatccagtctattaattgttgccgggaagctagagtaagtagttcgccagttaatagtttgcgcaacgttgttgccattgctacaggcatcgtggtgtcacgctcgtcgtttggtatggcttcattcagctccggttcccaacgatcaaggcgagttacatgatcccccatgttgtgcaaaaaagcggttagctccttcggtcctccgatcgttgtcagaagtaagttggccgcagtgttatcactcatggttatggcagcactgcataattctcttactgtcatgccatccgtaagatgcttttctgtgactggtgagtactcaaccaagtcattctgagaatagtgtatgcggcgaccgagttgctcttgcccggcgtcaatacgggataataccgcgccacatagcagaactttaaaagtgctcatcattggaaaacgttcttcggggcgaaaactctcaaggatcttaccgctgttgagatccagttcgatgtaacccactcgtgcacccaactgatcttcagcatcttttactttcaccagcgtttctgggtgagcaaaaacaggaaggcaaaatgccgcaaaaaagggaataagggcgacacggaaatgttgaatactcatactcttcctttttcaatattattgaagcatttatcagggttattgtctcatgagcggatacatatttgaatgtatttagaaaaataaacaaataggggttccgcgcacatttccccgaaaagtgccagatacctgaaacaaaacccatcgtacggccaaggaagtctccaataactgtgatccaccacaagcgccagggttttcccagtcacgacgttgtaaaacgacggccagtcatgcataatccgcacgcatctggaataaggaagtgccattccgcctgacctttgcctatgaggaccaaaacgaaaaaacaccctttcgggtgtcttttctggaatttggtaccgagaggctccatgattcagtatgacttgcctttggtcgaaaaaaaaagcccgcactgtcaggtgcgggcttttttctgtgtttccttattaggacccactttcacatttaagttgtttttctaatccgcatatgatcaattcaaggccgaataagaaggctggctctgcaccttggtgatcaaataattcgatagcttgtcgtaataatggcggcatactatcagtagtaggtgtttccctttcttctttagcgacttgatgctcttgatcttccaatacgcaacctaaagtaaaatgccccacagcgctgagtgcatataatgcattctctagtgaaaaaccttgttggcataaaaaggctaattgattttcgagagtttcatactgtttttctgtaggccgtgtacctaaatgtacttttgctccatcgcgatgacttagtaaagcacatctaaaacttttagcgttattacgtaaaaaatcttgccagctttccccttctaaagggcaaaagtgagtatggtgcctatctaacatctcaatggctaaggcgtcgagcaaagcccgcttattttttacatgccaatacaatgtaggctgctctacacctagcttctgggcgagtttacgggttgttaaaccttcgattccgacctcattaagcagctctaatgcgctgttaatcactttacttttatctaatctggacatattcaccaccctgaattgactctcttccgggcgctatcatgccataccgcgaaaggttttgcgccattcgatggcgcgccgccattgcttgtgcaatgtacatcagagattttgagacacaaccaattattgaaggcctccctaacggggggcctttttttgtttctggtcccccgcttaacgatcgttggctgttttcagcaggacgcactgacctccctatcagtgatagagattgacatccctatcagtgatagagatactgagcacagctgtcaccggatgtgctttccggtctgatgagtccgtgaggacgaaacagcctctacaaataattttgtttaaatcacacgggtaaggaggtatttaaatgaaaacactgtcccaagcacagtcgaagacgagtagccagcagttttctttcaccggtaattctagcgctaacgtgattatcggcaaccagaaactaactatcaacgacgtcgcccgcgttgctcggaacgggaccttagtaagcctgactaacaacactgatatacttcaaggcattcaggcgtcctgtgattatatcaataacgcagttgagtctggtgaaccaatttacggtgtgacctcaggcttcggcggtatggcgaacgttgctatcagccgtgaacaggcctccgaactgcaagagaatattgtatggtcacacaaaactggtgctgggaacaaactccctttggcggacgtacgtgcagcaatgctgctgcgcgccaactcgcatatgcgtggcgcgtccggtatccgtctggagctgatcaaacgtatggaaatcttcttgaacgctggtgttactccgtacgtttatgaatttggatctatcggcgcttctggagatctggtcccgctgagctacattacgggttccctgattggccttgacccgagcttcaaggtggatttcaacggcaaagaaatggacgccccgaccgcgttacgccagttaaatctgtctcccctgacacttctgcctaaagaaggtattgctatgatgaatgggacctcagtcatgactggcatcgcagctaactgcgtatacgacacccagatcctgactgcgattgcaatgggtgttcacgctctggatatccaggccctgaacggcaccaaccagtctttccacccgtttatccataactctaagccgcacccaggtcagctgtgggcggctgatcagatgatatcattgctggctaactcgcaactggtacgggacgagctggacggcaaacatgattaccgcgaccacgagctgatccaggatcgttatagcctgcgttgccttccgcagtacctgggtccgattgtggacggtatctcacagatagcaaaacaaatcgaaattgaaattaactccgttactgataaccctctgattgacgtcgataaccaggcgtcgtaccacggcggaaatttcctgggtcagtatgttggcatgggtatggaccaccttcgctactatatcggcctgctggcgaaacacctggatgtgcagattgcgctgctagctagtcccgaatttagcaacggactgccgccatctttattgggcaaccgtgaacgtaaggttaacatgggtctgaaaggtttacaaatctgtggcaattccatcatgccgctgctgacgttctacggcaatagcatcgccgaccgctttccgacccatgcagagcaattcaaccagaatatcaactctcagggctacacctccgcaacgctggcgcgacgtagtgttgatatcttccaaaactacgttgcgattgccctgatgtttggcgtccaggctgtagacctgaggacttataaaaagactggccattacgatgcgcgtgcttgcctctctccggctaccgaacgcctgtattccgccgtgcgtcacgtagttggtcagaaacctacttcagatcgcccatacatctggaacgataacgagcagggtctggatgaacacatcgctcgcatctccgctgacattgccgctggcggagtaattgttcaagctgtacaggatatcctgccgtgcctgcactaaccggcttatcggtcagtttcacctgatttacgtaaaaacccgcttcggcgggtttttgcttttggaggggcagaaagatgaatgactgtccacgacgctatacccaaaagaaa

SEQ ID NO: 372 - DNA, 5122 bp, synthetic construct
  source 1..5122: mol_type = other DNA
aggctaggtggaggctcagtgatgataagtctgcgatggtggatgcatgtgtcatggtcatagctgtttcctgtgtgaaattgttatccgctcagagggcacaatcctattccgcgctatccgacaatctccaagacattaggtggagttcagttcggcgagcggaaatggcttacgaacggggcggagatttcctggaagatgccaggaagatacttaacagggaagtgagagggccgcggcaaagccgtttttccataggctccgcccccctgacaagcatcacgaaatctgacgctcaaatcagtggtggcgaaacccgacaggactataaagataccaggcgtttccccctggcggctccctcgtgcgctctcctgttcctgcctttcggtttaccggtgtcattccgctgttatggccgcgtttgtctcattccacgcctgacactcagttccgggtaggcagttcgctccaagctggactgtatgcacgaaccccccgttcagtccgaccgctgcgccttatccggtaactatcgtcttgagtccaacccggaaagacatgcaaaagcaccactggcagcagccactggtaattgatttagaggagttagtcttgaagtcatgcgccggttaaggctaaactgaaaggacaagttttggtgactgcgctcctccaagccagttacctcggttcaaagagttggtagctcagagaaccttcgaaaaaccgccctgcaaggcggttttttcgttttcagagcaagagattacgcgcagaccaaaacgatctcaagaagatcatcttattaagtctgacgctctattcaacaaagccgccgtccatgggtagggggcttcaaatcgtcctcgtgataccaattcggagcctgcttttttgtacaaacttgttgataatggcaattcaaggatcttcacctagatccttttaaattaaaaatgaagttttaaatcaatctaaagtatatatgagtaaacttggtctgacagttaccaatgcttaatcagtgaggcacctatctcagcgatctgtctatttcgttcatccatagttgcctgactccccgtcgtgtagataactacgatacgggagggcttaccatctggccccagtgctgcaatgataccgcgagagccacgctcaccggctccagatttatcagcaataaaccagccagccggaagggccgagcgcagaagtggtcctgcaactttatccgcctccatccagtctattaattgttgccgggaagctagagtaagtagttcgccagttaatagtttgcgcaacgttgttgccattgctacaggcatcgtggtgtcacgctcgtcgtttggtatggcttcattcagctccggttcccaacgatcaaggcgagttacatgatcccccatgttgtgcaaaaaagcggttagctccttcggtcctccgatcgttgtcagaagtaagttggccgcagtgttatcactcatggttatggcagcactgcataattctcttactgtcatgccatccgtaagatgcttttctgtgactggtgagtactcaaccaagtcattctgagaatagtgtatgcggcgaccgagttgctcttgcccggcgtcaatacgggataataccgcgccacatagcagaactttaaaagtgctcatcattggaaaacgttcttcggggcgaaaactctcaaggatcttaccgctgttgagatccagttcgatgtaacccactcgtgcacccaactgatcttcagcatcttttactttcaccagcgtttctgggtgagcaaaaacaggaaggcaaaatgccgcaaaaaagggaataagggcgacacggaaatgttgaatactcatactcttcctttttcaatattattgaagcatttatcagggttattgtctcatgagcggatacatatttgaatgtatttagaaaaataaacaaataggggttccgcgcacatttccccgaaaagtgccagatacctgaaacaaaacccatcgtacggccaaggaagtctccaataactgtgatccaccacaagcgccagggttttcccagtcacgacgttgtaaaacgacggccagtcatgcataatccgcacgcatctggaataaggaagtgccattccgcctgacctttgcctatgaggaccaaaacgaaaaaacaccctttcgggtgtcttttctggaatttggtaccgagaggctccatgattcagtatgacttgcctttggtcgaaaaaaaaagcccgcactgtcaggtgcgggcttttttctgtgtttccttattaggacccactttcacatttaagttgtttttctaatccgcatatgatcaattcaaggccgaataagaaggctggctctgcaccttggtgatcaaataattcgatagcttgtcgtaataatggcggcatactatcagtagtaggtgtttccctttcttctttagcgacttgatgctcttgatcttccaatacgcaacctaaagtaaaatgccccacagcgctgagtgcatataatgcattctctagtgaaaaaccttgttggcataaaaaggctaattgattttcgagagtttcatactgtttttctgtaggccgtgtacctaaatgtacttttgctccatcgcgatgacttagtaaagcacatctaaaacttttagcgttattacgtaaaaaatcttgccagctttccccttctaaagggcaaaagtgagtatggtgcctatctaacatctcaatggctaaggcgtcgagcaaagcccgcttattttttacatgccaatacaatgtaggctgctctacacctagcttctgggcgagtttacgggttgttaaaccttcgattccgacctcattaagcagctctaatgcgctgttaatcactttacttttatctaatctggacatattcaccaccctgaattgactctcttccgggcgctatcatgccataccgcgaaaggttttgcgccattcgatggcgcgccgccattgcttgtgcaatgtacatcagagattttgagacacaaccaattattgaaggcctccctaacggggggcctttttttgtttctggtcccccgcttaacgatcgttggctgttttcagcaggacgcactgacctccctatcagtgatagagattgacatccctatcagtgatagagatactgagcacagctgtcaccggatgtgctttccggtctgatgagtccgtgaggacgaaacagcctctacaaataattttgtttaaatcacacgggtaaggaggtatttaaatgaaaacactgtcccaagcacagtcgaagacgagtagccagcagttttctttcaccggtaattctagcgctaacgtgattatcggcaaccagaaactaactatcaacgacgtcgcccgcgttgctcggaacgggaccttagtaagcctgactaacaacactgatatacttcaaggcattcaggcgtcctgtgattatatcaataacgcagttgagtctggtgaaccaatttacggtgtgacctcaggcttcggcggtatggcgaacgttgctatcagccgtgaacaggcctccgaactgcaagagaatatggtatggcacctgaaaactggtgctgggaacaaactccctttggcggacgtacgtgcagcaatgctgctgcgcgccaactcgcatatgcgtggcgcgtccggtatccgtctggagctgatcaaacgtatggaaatcttcttgaacgctggtgttactccgtacgtttatgaatttggatctatcggcgcttctggagatctggtcccgctgagctacattacgggttccctgattggccttgacccgagcttcaaggtggatttcaacggcaaagaaatggacgccccgaccgcgttacgccagttaaatctgtctcccctgacacttctgcctaaagaaggtctagctatgatgaatgggacctcagtcatgactggcatcgcagctaactgcgtatacgacacccagatcctgactgcgattgcaatgggtgttcacgctctggatatccaggccctgaacggcaccaaccagtctttccacccgtttatccataactctaagccgcacccaggtcagctgtgggcggctgatcagatgatatcattgctggctaactcgcaactggtacgggacgagctggacggcaaacatgattaccgcgaccacgagctgatccaggatcgttatagcctgcgttgccttccgcagtacctgggtccgattgtggacggtatctcacagatagcaaaacaaatcgaaattgaaattaactccgttactgataaccctctgattgacgtcgataaccaggcgtcgtaccacggcggaaatttcctgggtcagtatgttggcatgggtatggaccaccttcgctactatatcggcctgctggcgaaacacctggatgtgcagattgcgctgctagctagtcccgaatttagcaacggactgccgccatctttattgggcaaccgtgaacgtaaggttaacatgggtctgaaaggtttacaaatctgtggcaattccatcatgccgctgctgacgttctacggcaatagcatcgccgaccgctttccgacccatgcagagcaattcaaccagaatatcaactctcagggctacacctccgcaacgctggcgcgacgtagtgttgatatcttccaaaactacgttgcgattgccctgatgtttggcgtccaggctgtagacctgaggacttataaaaagactggccattacgatgcgcgtgcttgcctctctccggctaccgaacgcctgtattccgccgtgcgtcacgtagttggtcagaaacctacttcagatcgcccatacatctggaacgataacgagcagggtctggatgaacacatcgctcgcatctccgctgacattgccgctggcggagtaattgttcaagctgtacaggatatcctgccgtgcctgcactaaccggcttatcggtcagtttcacctgatttacgtaaaaacccgcttcggcgggtttttgcttttggaggggcagaaagatgaatgactgtccacgacgctatacccaaaagaaa

SEQ ID NO: 373 - DNA, 5122 bp, synthetic construct
  source 1..5122: mol_type = other DNA
aggctaggtggaggctcagtgatgataagtctgcgatggtggatgcatgtgtcatggtcatagctgtttcctgtgtgaaattgttatccgctcagagggcacaatcctattccgcgctatccgacaatctccaagacattaggtggagttcagttcggcgagcggaaatggcttacgaacggggcggagatttcctggaagatgccaggaagatacttaacagggaagtgagagggccgcggcaaagccgtttttccataggctccgcccccctgacaagcatcacgaaatctgacgctcaaatcagtggtggcgaaacccgacaggactataaagataccaggcgtttccccctggcggctccctcgtgcgctctcctgttcctgcctttcggtttaccggtgtcattccgctgttatggccgcgtttgtctcattccacgcctgacactcagttccgggtaggcagttcgctccaagctggactgtatgcacgaaccccccgttcagtccgaccgctgcgccttatccggtaactatcgtcttgagtccaacccggaaagacatgcaaaagcaccactggcagcagccactggtaattgatttagaggagttagtcttgaagtcatgcgccggttaaggctaaactgaaaggacaagttttggtgactgcgctcctccaagccagttacctcggttcaaagagttggtagctcagagaaccttcgaaaaaccgccctgcaaggcggttttttcgttttcagagcaagagattacgcgcagaccaaaacgatctcaagaagatcatcttattaagtctgacgctctattcaacaaagccgccgtccatgggtagggggcttcaaatcgtcctcgtgataccaattcggagcctgcttttttgtacaaacttgttgataatggcaattcaaggatcttcacctagatccttttaaattaaaaatgaagttttaaatcaatctaaagtatatatgagtaaacttggtctgacagttaccaatgcttaatcagtgaggcacctatctcagcgatctgtctatttcgttcatccatagttgcctgactccccgtcgtgtagataactacgatacgggagggcttaccatctggccccagtgctgcaatgataccgcgagagccacgctcaccggctccagatttatcagcaataaaccagccagccggaagggccgagcgcagaagtggtcctgcaactttatccgcctccatccagtctattaattgttgccgggaagctagagtaagtagttcgccagttaatagtttgcgcaacgttgttgccattgctacaggcatcgtggtgtcacgctcgtcgtttggtatggcttcattcagctccggttcccaacgatcaaggcgagttacatgatcccccatgttgtgcaaaaaagcggttagctccttcggtcctccgatcgttgtcagaagtaagttggccgcagtgttatcactcatggttatggcagcactgcataattctcttactgtcatgccatccgtaagatgcttttctgtgactggtgagtactcaaccaagtcattctgagaatagtgtatgcggcgaccgagttgctcttgcccggcgtcaatacgggataataccgcgccacatagcagaactttaaaagtgctcatcattggaaaacgttcttcggggcgaaaactctcaaggatcttaccgctgttgagatccagttcgatgtaacccactcgtgcacccaactgatcttcagcatcttttactttcaccagcgtttctgggtgagcaaaaacaggaaggcaaaatgccgcaaaaaagggaataagggcgacacggaaatgttgaatactcatactcttcctttttcaatattattgaagcatttatcagggttattgtctcatgagcggatacatatttgaatgtatttagaaaaataaacaaataggggttccgcgcacatttccccgaaaagtgccagatacctgaaacaaaacccatcgtacggccaaggaagtctccaataactgtgatccaccacaagcgccagggttttcccagtcacgacgttgtaaaacgacggccagtcatgcataatccgcacgcatctggaataaggaagtgccattccgcctgacctttgcctatgaggaccaaaacgaaaaaacaccctttcgggtgtcttttctggaatttggtaccgagaggctccatgattcagtatgacttgcctttggtcgaaaaaaaaagcccgcactgtcaggtgcgggcttttttctgtgtttccttattaggacccactttcacatttaagttgtttttctaatccgcatatgatcaattcaaggccgaataagaaggctggctctgcaccttggtgatcaaataattcgatagcttgtcgtaataatggcggcatactatcagtagtaggtgtttccctttcttctttagcgacttgatgctcttgatcttccaatacgcaacctaaagtaaaatgccccacagcgctgagtgcatataatgcattctctagtgaaaaaccttgttggcataaaaaggctaattgattttcgagagtttcatactgtttttctgtaggccgtgtacctaaatgtacttttgctccatcgcgatgacttagtaaagcacatctaaaacttttagcgttattacgtaaaaaatcttgccagctttccccttctaaagggcaaaagtgagtatggtgcctatctaacatctcaatggctaaggcgtcgagcaaagcccgcttattttttacatgccaatacaatgtaggctgctctacacctagcttctgggcgagtttacgggttgttaaaccttcgattccgacctcattaagcagctctaatgcgctgttaatcactttacttttatctaatctggacatattcaccaccctgaattgactctcttccgggcgctatcatgccataccgcgaaaggttttgcgccattcgatggcgcgccgccattgcttgtgcaatgtacatcagagattttgagacacaaccaattattgaaggcctccctaacggggggcctttttttgtttctggtcccccgcttaacgatcgttggctgttttcagcaggacgcactgacctccctatcagtgatagagattgacatccctatcagtgatagagatactgagcacagctgtcaccggatgtgctttccggtctgatgagtccgtgaggacgaaacagcctctacaaataattttgtttaaatcacacgggtaaggaggtatttaaatgaaaacactgtcccaagcacagtcgaagacgagtagccagcagttttctttcaccggtaattctagcgctaacgtgattatcggcaaccagaaactaactatcaacgacgtcgcccgcgttgctcggaacgggaccttagtaagcctgactaacaacactgatatacttcaaggcattcaggcgtcctgtgattatatcaataacgcagttgagtctggtgaaccaatttacggtgtgacctcaggcttcggcggtatggcgaacgttgctatcagccgtgaacaggcctccgaactgcaaaccaatattgtatggcatacgaaaactggtgctgggaacaaactccctttggcggacgtacgtgcagcaatgctgctgcgcgccaactcgcatatgcgtggcgcgtccggtatccgtctggagctgatcaaacgtatggaaatcttcttgaacgctggtgttactccgtacgtttatgaatttggatctatcggcgcttctggagatctggtcccgctgagctacattacgggttccctgattggccttgacccgagcttcaaggtggatttcaacggcaaagaaatggacgccccgaccgcgttacgccagttaaatctgtctcccctgacacttctgcctaaagaaggtattgctatgttgaatgggacctcagtcatgactggcatcgcagctaactgcgtatacgacacccagatcctgactgcgattgcaatgggtgttcacgctctggatatccaggccctgaacggcaccaaccagtctttccacccgtttatccataactctaagccgcacccaggtcagctgtgggcggctgatcagatgatatcattgctggctaactcgcaactggtacgggacgagctggacggcaaacatgattaccgcgaccacgagctgatccaggatcgttatagcctgcgttgccttccgcagtacctgggtccgattgtggacggtatctcacagatagcaaaacaaatcgaaattgaaattaactccgttactgataaccctctgattgacgtcgataaccaggcgtcgtaccacggcggaaatttcctgggtcagtatgttggcatgggtatggaccaccttcgctactatatcggcctgctggcgaaacacctggatgtgcagattgcgctgctagctagtcccgaatttagcaacggactgccgccatctttattgggcaaccgtgaacgtaaggttaacatgggtctgaaaggtttacaaatctgtggcaattccatcatgccgctgctgacgttctacggcaatagcatcgccgaccgctttccgacccatgcagagcaattcaaccagaatatcaactctcagggctacacctccgcaacgctggcgcgacgtagtgttgatatcttccaaaactacgttgcgattgccctgatgtttggcgtccaggctgtagacctgaggacttataaaaagactggccattacgatgcgcgtgcttgcctctctccggctaccgaacgcctgtattccgccgtgcgtcacgtagttggtcagaaacctacttcagatcgcccatacatctggaacgataacgagcagggtctggatgaacacatcgctcgcatctccgctgacattgccgctggcggagtaattgttcaagctgtacaggatatcctgccgtgcctgcactaaccggcttatcggtcagtttcacctgatttacgtaaaaacccgcttcggcgggtttttgcttttggaggggcagaaagatgaatgactgtccacgacgctatacccaaaagaaa

SEQ ID NO: 374 - DNA, 5122 bp, synthetic construct
  source 1..5122: mol_type = other DNA
aggctaggtggaggctcagtgatgataagtctgcgatggtggatgcatgtgtcatggtcatagctgtttcctgtgtgaaattgttatccgctcagagggcacaatcctattccgcgctatccgacaatctccaagacattaggtggagttcagttcggcgagcggaaatggcttacgaacggggcggagatttcctggaagatgccaggaagatacttaacagggaagtgagagggccgcggcaaagccgtttttccataggctccgcccccctgacaagcatcacgaaatctgacgctcaaatcagtggtggcgaaacccgacaggactataaagataccaggcgtttccccctggcggctccctcgtgcgctctcctgttcctgcctttcggtttaccggtgtcattccgctgttatggccgcgtttgtctcattccacgcctgacactcagttccgggtaggcagttcgctccaagctggactgtatgcacgaaccccccgttcagtccgaccgctgcgccttatccggtaactatcgtcttgagtccaacccggaaagacatgcaaaagcaccactggcagcagccactggtaattgatttagaggagttagtcttgaagtcatgcgccggttaaggctaaactgaaaggacaagttttggtgactgcgctcctccaagccagttacctcggttcaaagagttggtagctcagagaaccttcgaaaaaccgccctgcaaggcggttttttcgttttcagagcaagagattacgcgcagaccaaaacgatctcaagaagatcatcttattaagtctgacgctctattcaacaaagccgccgtccatgggtagggggcttcaaatcgtcctcgtgataccaattcggagcctgcttttttgtacaaacttgttgataatggcaattcaaggatcttcacctagatccttttaaattaaaaatgaagttttaaatcaatctaaagtatatatgagtaaacttggtctgacagttaccaatgcttaatcagtgaggcacctatctcagcgatctgtctatttcgttcatccatagttgcctgactccccgtcgtgtagataactacgatacgggagggcttaccatctggccccagtgctgcaatgataccgcgagagccacgctcaccggctccagatttatcagcaataaaccagccagccggaagggccgagcgcagaagtggtcctgcaactttatccgcctccatccagtctattaattgttgccgggaagctagagtaagtagttcgccagttaatagtttgcgcaacgttgttgccattgctacaggcatcgtggtgtcacgctcgtcgtttggtatggcttcattcagctccggttcccaacgatcaaggcgagttacatgatcccccatgttgtgcaaaaaagcggttagctccttcggtcctccgatcgttgtcagaagtaagttggccgcagtgttatcactcatggttatggcagcactgcataattctcttactgtcatgccatccgtaagatgcttttctgtgactggtgagtactcaaccaagtcattctgagaatagtgtatgcggcgaccgagttgctcttgcccggcgtcaatacgggataataccgcgccacatagcagaactttaaaagtgctcatcattggaaaacgttcttcggggcgaaaactctcaaggatcttaccgctgttgagatccagttcgatgtaacccactcgtgcacccaactgatcttcagcatcttttactttcaccagcgtttctgggtgagcaaaaacaggaaggcaaaatgccgcaaaaaagggaataagggcgacacggaaatgttgaatactcatactcttcctttttcaatattattgaagcatttatcagggttattgtctcatgagcggatacatatttgaatgtatttagaaaaataaacaaataggggttccgcgcacatttccccgaaaagtgccagatacctgaaacaaaacccatcgtacggccaaggaagtctccaataactgtgatccaccacaagcgccagggttttcccagtcacgacgttgtaaaacgacggccagtcatgcataatccgcacgcatctggaataaggaagtgccattccgcctgacctttgcctatgaggaccaaaacgaaaaaacaccctttcgggtgtcttttctggaatttggtaccgagaggctccatgattcagtatgacttgcctttggtcgaaaaaaaaagcccgcactgtcaggtgcgggcttttttctgtgtttccttattaggacccactttcacatttaagttgtttttctaatccgcatatgatcaattcaaggccgaataagaaggctggctctgcaccttggtgatcaaataattcgatagcttgtcgtaataatggcggcatactatcagtagtaggtgtttccctttcttctttagcgacttgatgctcttgatcttccaatacgcaacctaaagtaaaatgccccacagcgctgagtgcatataatgcattctctagtgaaaaaccttgttggcataaaaaggctaattgattttcgagagtttcatactgtttttctgtaggccgtgtacctaaatgtacttttgctccatcgcgatgacttagtaaagcacatctaaaacttttagcgttattacgtaaaaaatcttgccagctttccccttctaaagggcaaaagtgagtatggtgcctatctaacatctcaatggctaaggcgtcgagcaaagcccgcttattttttacatgccaatacaatgtaggctgctctacacctagcttctgggcgagtttacgggttgttaaaccttcgattccgacctcattaagcagctctaatgcgctgttaatcactttacttttatctaatctggacatattcaccaccctgaattgactctcttccgggcgctatcatgccataccgcgaaaggttttgcgccattcgatggcgcgccgccattgcttgtgcaatgtacatcagagattttgagacacaaccaattattgaaggcctccctaacggggggcctttttttgtttctggtcccccgcttaacgatcgttggctgttttcagcaggacgcactgacctccctatcagtgatagagattgacatccctatcagtgatagagatactgagcacagctgtcaccggatgtgctttccggtctgatgagtccgtgaggacgaaacagcctctacaaataattttgtttaaatcacacgggtaaggaggtatttaaatgaaaacactgtcccaagcacagtcgaagacgagtagccagcagttttctttcaccggtaattctagcgctaacgtgattatcggcaaccagaaactaactatcaacgacgtcgcccgcgttgctcggaacgggaccttagtaagcctgactaacaacactgatatacttcaaggcattcaggcgtcctgtgattatatcaataacgcagttgagtctggtgaaccaatttacggtgtgacctcaggcttcggcggtatggcgaacgttgctatcagccgtgaacaggcctccgaactgcaaaccaatttggtatggcatatgaaaactggtgctgggaacaaactccctttggcggacgtacgtgcagcaatgctgctgcgcgccaactcgcatatgcgtggcgcgtccggtatccgtctggagctgatcaaacgtatggaaatcttcttgaacgctggtgttactccgtacgtttatgaatttggatctatcggcgcttctggagatctggtcccgctgagctacattacgggttccctgattggccttgacccgagcttcaaggtggatttcaacggcaaagaaatggacgccccgaccgcgttacgccagttaaatctgtctcccctgacacttctgcctaaagaaggtctagctatggtcaatgggacctcagtcatgactggcatcgcagctaactgcgtatacgacacccagatcctgactgcgattgcaatgggtgttcacgctctggatatccaggccctgaacggcaccaaccagtctttccacccgtttatccataactctaagccgcacccaggtcagctgtgggcggctgatcagatgatatcattgctggctaactcgcaactggtacgggacgagctggacggcaaacatgattaccgcgaccacgagctgatccaggatcgttatagcctgcgttgccttccgcagtacctgggtccgattgtggacggtatctcacagatagcaaaacaaatcgaaattgaaattaactccgttactgataaccctctgattgacgtcgataaccaggcgtcgtaccacggcggaaatttcctgggtcagtatgttggcatgggtatggaccaccttcgctactatatcggcctgctggcgaaacacctggatgtgcagattgcgctgctagctagtcccgaatttagcaacggactgccgccatctttattgggcaaccgtgaacgtaaggttaacatgggtctgaaaggtttacaaatctgtggcaattccatcatgccgctgctgacgttctacggcaatagcatcgccgaccgctttccgacccatgcagagcaattcaaccagaatatcaactctcagggctacacctccgcaacgctggcgcgacgtagtgttgatatcttccaaaactacgttgcgattgccctgatgtttggcgtccaggctgtagacctgaggacttataaaaagactggccattacgatgcgcgtgcttgcctctctccggctaccgaacgcctgtattccgccgtgcgtcacgtagttggtcagaaacctacttcagatcgcccatacatctggaacgataacgagcagggtctggatgaacacatcgctcgcatctccgctgacattgccgctggcggagtaattgttcaagctgtacaggatatcctgccgtgcctgcactaaccggcttatcggtcagtttcacctgatttacgtaaaaacccgcttcggcgggtttttgcttttggaggggcagaaagatgaatgactgtccacgacgctatacccaaaagaaa

SEQ ID NO: 375 - DNA, 5122 bp, synthetic construct
  source 1..5122: mol_type = other DNA
aggctaggtggaggctcagtgatgataagtctgcgatggtggatgcatgtgtcatggtcatagctgtttcctgtgtgaaattgttatccgctcagagggcacaatcctattccgcgctatccgacaatctccaagacattaggtggagttcagttcggcgagcggaaatggcttacgaacggggcggagatttcctggaagatgccaggaagatacttaacagggaagtgagagggccgcggcaaagccgtttttccataggctccgcccccctgacaagcatcacgaaatctgacgctcaaatcagtggtggcgaaacccgacaggactataaagataccaggcgtttccccctggcggctccctcgtgcgctctcctgttcctgcctttcggtttaccggtgtcattccgctgttatggccgcgtttgtctcattccacgcctgacactcagttccgggtaggcagttcgctccaagctggactgtatgcacgaaccccccgttcagtccgaccgctgcgccttatccggtaactatcgtcttgagtccaacccggaaagacatgcaaaagcaccactggcagcagccactggtaattgatttagaggagttagtcttgaagtcatgcgccggttaaggctaaactgaaaggacaagttttggtgactgcgctcctccaagccagttacctcggttcaaagagttggtagctcagagaaccttcgaaaaaccgccctgcaaggcggttttttcgttttcagagcaagagattacgcgcagaccaaaacgatctcaagaagatcatcttattaagtctgacgctctattcaacaaagccgccgtccatgggtagggggcttcaaatcgtcctcgtgataccaattcggagcctgcttttttgtacaaacttgttgataatggcaattcaaggatcttcacctagatccttttaaattaaaaatgaagttttaaatcaatctaaagtatatatgagtaaacttggtctgacagttaccaatgcttaatcagtgaggcacctatctcagcgatctgtctatttcgttcatccatagttgcctgactccccgtcgtgtagataactacgatacgggagggcttaccatctggccccagtgctgcaatgataccgcgagagccacgctcaccggctccagatttatcagcaataaaccagccagccggaagggccgagcgcagaagtggtcctgcaactttatccgcctccatccagtctattaattgttgccgggaagctagagtaagtagttcgccagttaatagtttgcgcaacgttgttgccattgctacaggcatcgtggtgtcacgctcgtcgtttggtatggcttcattcagctccggttcccaacgatcaaggcgagttacatgatcccccatgttgtgcaaaaaagcggttagctccttcggtcctccgatcgttgtcagaagtaagttggccgcagtgttatcactcatggttatggcagcactgcataattctcttactgtcatgccatccgtaagatgcttttctgtgactggtgagtactcaaccaagtcattctgagaatagtgtatgcggcgaccgagttgctcttgcccggcgtcaatacgggataataccgcgccacatagcagaactttaaaagtgctcatcattggaaaacgttcttcggggcgaaaactctcaaggatcttaccgctgttgagatccagttcgatgtaacccactcgtgcacccaactgatcttcagcatcttttactttcaccagcgtttctgggtgagcaaaaacaggaaggcaaaatgccgcaaaaaagggaataagggcgacacggaaatgttgaatactcatactcttcctttttcaatattattgaagcatttatcagggttattgtctcatgagcggatacatatttgaatgtatttagaaaaataaacaaataggggttccgcgcacatttccccgaaaagtgccagatacctgaaacaaaacccatcgtacggccaaggaagtctccaataactgtgatccaccacaagcgccagggttttcccagtcacgacgttgtaaaacgacggccagtcatgcataatccgcacgcatctggaataaggaagtgccattccgcctgacctttgcctatgaggaccaaaacgaaaaaacaccctttcgggtgtcttttctggaatttggtaccgagaggctccatgattcagtatgacttgcctttggtcgaaaaaaaaagcccgcactgtcaggtgcgggcttttttctgtgtttccttattaggacccactttcacatttaagttgtttttctaatccgcatatgatcaattcaaggccgaataagaaggctggctctgcaccttggtgatcaaataattcgatagcttgtcgtaataatggcggcatactatcagtagtaggtgtttccctttcttctttagcgacttgatgctcttgatcttccaatacgcaacctaaagtaaaatgccccacagcgctgagtgcatataatgcattctctagtgaaaaaccttgttggcataaaaaggctaattgattttcgagagtttcatactgtttttctgtaggccgtgtacctaaatgtacttttgctccatcgcgatgacttagtaaagcacatctaaaacttttagcgttattacgtaaaaaatcttgccagctttccccttctaaagggcaaaagtgagtatggtgcctatctaacatctcaatggctaaggcgtcgagcaaagcccgcttattttttacatgccaatacaatgtaggctgctctacacctagcttctgggcgagtttacgggttgttaaaccttcgattccgacctcattaagcagctctaatgcgctgttaatcactttacttttatctaatctggacatattcaccaccctgaattgactctcttccgggcgctatcatgccataccgcgaaaggttttgcgccattcgatggcgcgccgccattgcttgtgcaatgtacatcagagattttgagacacaaccaattattgaaggcctccctaacggggggcctttttttgtttctggtcccccgcttaacgatcgttggctgttttcagcaggacgcactgacctccctatcagtgatagagattgacatccctatcagtgatagagatactgagcacagctgtcaccggatgtgctttccggtctgatgagtccgtgaggacgaaacagcctctacaaataattttgtttaaatcacacgggtaaggaggtatttaaatgaaaacactgtcccaagcacagtcgaagacgagtagccagcagttttctttcaccggtaattctagcgctaacgtgattatcggcaaccagaaactaactatcaacgacgtcgcccgcgttgctcggaacgggaccttagtaagcctgactaacaacactgatatacttcaaggcattcaggcgtcctgtgattatatcaataacgcagttgagtctggtgaaccaatttacggtgtgacctcaggcttcggcggtatggcgaacgttgctatcagccgtgaacaggcctccgaactgcaaaagaatttggtatggagtcataaaactggtgctgggaacaaactccctttggcggacgtacgtgcagcaatgctgctgcgcgccaactcgcatatgcgtggcgcgtccggtatccgtctggagctgatcaaacgtatggaaatcttcttgaacgctggtgttactccgtacgtttatgaatttggatctatcggcgcttctggagatctggtcccgctgagctacattacgggttccctgattggccttgacccgagcttcaaggtggatttcaacggcaaagaaatggacgccccgaccgcgttacgccagttaaatctgtctcccctgacacttctgcctaaagaatcgattgctatgatgaatgggacctcagtcatgactggcatcgcagctaactgcgtatacgacacccagatcctgactgcgattgcaatgggtgttcacgctctggatatccaggccctgaacggcaccaaccagtctttccacccgtttatccataactctaagccgcacccaggtcagctgtgggcggctgatcagatgatatcattgctggctaactcgcaactggtacgggacgagctggacggcaaacatgattaccgcgaccacgagctgatccaggatcgttatagcctgcgttgccttccgcagtacctgggtccgattgtggacggtatctcacagatagcaaaacaaatcgaaattgaaattaactccgttactgataaccctctgattgacgtcgataaccaggcgtcgtaccacggcggaaatttcctgggtcagtatgttggcatgggtatggaccaccttcgctactatatcggcctgctggcgaaacacctggatgtgcagattgcgctgctagctagtcccgaatttagcaacggactgccgccatctttattgggcaaccgtgaacgtaaggttaacatgggtctgaaaggtttacaaatctgtggcaattccatcatgccgctgctgacgttctacggcaatagcatcgccgaccgctttccgacccatgcagagcaattcaaccagaatatcaactctcagggctacacctccgcaacgctggcgcgacgtagtgttgatatcttccaaaactacgttgcgattgccctgatgtttggcgtccaggctgtagacctgaggacttataaaaagactggccattacgatgcgcgtgcttgcctctctccggctaccgaacgcctgtattccgccgtgcgtcacgtagttggtcagaaacctacttcagatcgcccatacatctggaacgataacgagcagggtctggatgaacacatcgctcgcatctccgctgacattgccgctggcggagtaattgttcaagctgtacaggatatcctgccgtgcctgcactaaccggcttatcggtcagtttcacctgatttacgtaaaaacccgcttcggcgggtttttgcttttggaggggcagaaagatgaatgactgtccacgacgctatacccaaaagaaa

SEQ ID NO: 376 - DNA, 5122 bp, synthetic construct
  source 1..5122: mol_type = other DNA
aggctaggtggaggctcagtgatgataagtctgcgatggtggatgcatgtgtcatggtcatagctgtttcctgtgtgaaattgttatccgctcagagggcacaatcctattccgcgctatccgacaatctccaagacattaggtggagttcagttcggcgagcggaaatggcttacgaacggggcggagatttcctggaagatgccaggaagatacttaacagggaagtgagagggccgcggcaaagccgtttttccataggctccgcccccctgacaagcatcacgaaatctgacgctcaaatcagtggtggcgaaacccgacaggactataaagataccaggcgtttccccctggcggctccctcgtgcgctctcctgttcctgcctttcggtttaccggtgtcattccgctgttatggccgcgtttgtctcattccacgcctgacactcagttccgggtaggcagttcgctccaagctggactgtatgcacgaaccccccgttcagtccgaccgctgcgccttatccggtaactatcgtcttgagtccaacccggaaagacatgcaaaagcaccactggcagcagccactggtaattgatttagaggagttagtcttgaagtcatgcgccggttaaggctaaactgaaaggacaagttttggtgactgcgctcctccaagccagttacctcggttcaaagagttggtagctcagagaaccttcgaaaaaccgccctgcaaggcggttttttcgttttcagagcaagagattacgcgcagaccaaaacgatctcaagaagatcatcttattaagtctgacgctctattcaacaaagccgccgtccatgggtagggggcttcaaatcgtcctcgtgataccaattcggagcctgcttttttgtacaaacttgttgataatggcaattcaaggatcttcacctagatccttttaaattaaaaatgaagttttaaatcaatctaaagtatatatgagtaaacttggtctgacagttaccaatgcttaatcagtgaggcacctatctcagcgatctgtctatttcgttcatccatagttgcctgactccccgtcgtgtagataactacgatacgggagggcttaccatctggccccagtgctgcaatgataccgcgagagccacgctcaccggctccagatttatcagcaataaaccagccagccggaagggccgagcgcagaagtggtcctgcaactttatccgcctccatccagtctattaattgttgccgggaagctagagtaagtagttcgccagttaatagtttgcgcaacgttgttgccattgctacaggcatcgtggtgtcacgctcgtcgtttggtatggcttcattcagctccggttcccaacgatcaaggcgagttacatgatcccccatgttgtgcaaaaaagcggttagctccttcggtcctccgatcgttgtcagaagtaagttggccgcagtgttatcactcatggttatggcagcactgcataattctcttactgtcatgccatccgtaagatgcttttctgtgactggtgagtactcaaccaagtcattctgagaatagtgtatgcggcgaccgagttgctcttgcccggcgtcaatacgggataataccgcgccacatagcagaactttaaaagtgctcatcattggaaaacgttcttcggggcgaaaactctcaaggatcttaccgctgttgagatccagttcgatgtaacccactcgtgcacccaactgatcttcagcatcttttactttcaccagcgtttctgggtgagcaaaaacaggaaggcaaaatgccgcaaaaaagggaataagggcgacacggaaatgttgaatactcatactcttcctttttcaatattattgaagcatttatcagggttattgtctcatgagcggatacatatttgaatgtatttagaaaaataaacaaataggggttccgcgcacatttccccgaaaagtgccagatacctgaaacaaaacccatcgtacggccaaggaagtctccaataactgtgatccaccacaagcgccagggttttcccagtcacgacgttgtaaaacgacggccagtcatgcataatccgcacgcatctggaataaggaagtgccattccgcctgacctttgcctatgaggaccaaaacgaaaaaacaccctttcgggtgtcttttctggaatttggtaccgagaggctccatgattcagtatgacttgcctttggtcgaaaaaaaaagcccgcactgtcaggtgcgggcttttttctgtgtttccttattaggacccactttcacatttaagttgtttttctaatccgcatatgatcaattcaaggccgaataagaaggctggctctgcaccttggtgatcaaataattcgatagcttgtcgtaataatggcggcatactatcagtagtaggtgtttccctttcttctttagcgacttgatgctcttgatcttccaatacgcaacctaaagtaaaatgccccacagcgctgagtgcatataatgcattctctagtgaaaaaccttgttggcataaaaaggctaattgattttcgagagtttcatactgtttttctgtaggccgtgtacctaaatgtacttttgctccatcgcgatgacttagtaaagcacatctaaaacttttagcgttattacgtaaaaaatcttgccagctttccccttctaaagggcaaaagtgagtatggtgcctatctaacatctcaatggctaaggcgtcgagcaaagcccgcttattttttacatgccaatacaatgtaggctgctctacacctagcttctgggcgagtttacgggttgttaaaccttcgattccgacctcattaagcagctctaatgcgctgttaatcactttacttttatctaatctggacatattcaccaccctgaattgactctcttccgggcgctatcatgccataccgcgaaaggttttgcgccattcgatggcgcgccgccattgcttgtgcaatgtacatcagagattttgagacacaaccaattattgaaggcctccctaacggggggcctttttttgtttctggtcccccgcttaacgatcgttggctgttttcagcaggacgcactgacctccctatcagtgatagagattgacatccctatcagtgatagagatactgagcacagctgtcaccggatgtgctttccggtctgatgagtccgtgaggacgaaacagcctctacaaataattttgtttaaatcacacgggtaaggaggtatttaaatgaaaacactgtcccaagcacagtcgaagacgagtagccagcagttttctttcaccggtaattctagcgctaacgtgattatcggcaaccagaaactaactatcaacgacgtcgcccgcgttgctcggaacgggaccttagtaagcctgactaacaacactgatatacttcaaggcattcaggcgtcctgtgattatatcaataacgcagttgagtctggtgaaccaatttacggtgtgacctcaggcttcggcggtatggcgaacgttgctatcagccgtgaacaggcctccgaactgcaacacaatttggtatggtcgcataaaactggtgctgggaacaaactccctttggcggacgtacgtgcagcaatgctgctgcgcgccaactcgcatatgcgtggcgcgtccggtatccgtctggagctgatcaaacgtatggaaatcttcttgaacgctggtgttactccgtacgtttatgaatttggatctatcggcgcttctggagatctggtcccgctgagctacattacgggttccctgattggccttgacccgagcttcaaggtggatttcaacggcaaagaaatggacgccccgaccgcgttacgccagttaaatctgtctcccctgacacttctgcctaaagaagcgctagctatggtgaatgggacctcagtcatgactggcatcgcagctaactgcgtatacgacacccagatcctgactgcgattgcaatgggtgttcacgctctggatatccaggccctgaacggcaccaaccagtctttccacccgtttatccataactctaagccgcacccaggtcagctgtgggcggctgatcagatgatatcattgctggctaactcgcaactggtacgggacgagctggacggcaaacatgattaccgcgaccacgagctgatccaggatcgttatagcctgcgttgccttccgcagtacctgggtccgattgtggacggtatctcacagatagcaaaacaaatcgaaattgaaattaactccgttactgataaccctctgattgacgtcgataaccaggcgtcgtaccacggcggaaatttcctgggtcagtatgttggcatgggtatggaccaccttcgctactatatcggcctgctggcgaaacacctggatgtgcagattgcgctgctagctagtcccgaatttagcaacggactgccgccatctttattgggcaaccgtgaacgtaaggttaacatgggtctgaaaggtttacaaatctgtggcaattccatcatgccgctgctgacgttctacggcaatagcatcgccgaccgctttccgacccatgcagagcaattcaaccagaatatcaactctcagggctacacctccgcaacgctggcgcgacgtagtgttgatatcttccaaaactacgttgcgattgccctgatgtttggcgtccaggctgtagacctgaggacttataaaaagactggccattacgatgcgcgtgcttgcctctctccggctaccgaacgcctgtattccgccgtgcgtcacgtagttggtcagaaacctacttcagatcgcccatacatctggaacgataacgagcagggtctggatgaacacatcgctcgcatctccgctgacattgccgctggcggagtaattgttcaagctgtacaggatatcctgccgtgcctgcactaaccggcttatcggtcagtttcacctgatttacgtaaaaacccgcttcggcgggtttttgcttttggaggggcagaaagatgaatgactgtccacgacgctatacccaaaagaaa

SEQ ID NO: 377 - DNA, 5122 bp, synthetic construct
  source 1..5122: mol_type = other DNA
aggctaggtggaggctcagtgatgataagtctgcgatggtggatgcatgtgtcatggtcatagctgtttcctgtgtgaaattgttatccgctcagagggcacaatcctattccgcgctatccgacaatctccaagacattaggtggagttcagttcggcgagcggaaatggcttacgaacggggcggagatttcctggaagatgccaggaagatacttaacagggaagtgagagggccgcggcaaagccgtttttccataggctccgcccccctgacaagcatcacgaaatctgacgctcaaatcagtggtggcgaaacccgacaggactataaagataccaggcgtttccccctggcggctccctcgtgcgctctcctgttcctgcctttcggtttaccggtgtcattccgctgttatggccgcgtttgtctcattccacgcctgacactcagttccgggtaggcagttcgctccaagctggactgtatgcacgaaccccccgttcagtccgaccgctgcgccttatccggtaactatcgtcttgagtccaacccggaaagacatgcaaaagcaccactggcagcagccactggtaattgatttagaggagttagtcttgaagtcatgcgccggttaaggctaaactgaaaggacaagttttggtgactgcgctcctccaagccagttacctcggttcaaagagttggtagctcagagaaccttcgaaaaaccgccctgcaaggcggttttttcgttttcagagcaagagattacgcgcagaccaaaacgatctcaagaagatcatcttattaagtctgacgctctattcaacaaagccgccgtccatgggtagggggcttcaaatcgtcctcgtgataccaattcggagcctgcttttttgtacaaacttgttgataatggcaattcaaggatcttcacctagatccttttaaattaaaaatgaagttttaaatcaatctaaagtatatatgagtaaacttggtctgacagttaccaatgcttaatcagtgaggcacctatctcagcgatctgtctatttcgttcatccatagttgcctgactccccgtcgtgtagataactacgatacgggagggcttaccatctggccccagtgctgcaatgataccgcgagagccacgctcaccggctccagatttatcagcaataaaccagccagccggaagggccgagcgcagaagtggtcctgcaactttatccgcctccatccagtctattaattgttgccgggaagctagagtaagtagttcgccagttaatagtttgcgcaacgttgttgccattgctacaggcatcgtggtgtcacgctcgtcgtttggtatggcttcattcagctccggttcccaacgatcaaggcgagttacatgatcccccatgttgtgcaaaaaagcggttagctccttcggtcctccgatcgttgtcagaagtaagttggccgcagtgttatcactcatggttatggcagcactgcataattctcttactgtcatgccatccgtaagatgcttttctgtgactggtgagtactcaaccaagtcattctgagaatagtgtatgcggcgaccgagttgctcttgcccggcgtcaatacgggataataccgcgccacatagcagaactttaaaagtgctcatcattggaaaacgttcttcggggcgaaaactctcaaggatcttaccgctgttgagatccagttcgatgtaacccactcgtgcacccaactgatcttcagcatcttttactttcaccagcgtttctgggtgagcaaaaacaggaaggcaaaatgccgcaaaaaagggaataagggcgacacggaaatgttgaatactcatactcttcctttttcaatattattgaagcatttatcagggttattgtctcatgagcggatacatatttgaatgtatttagaaaaataaacaaataggggttccgcgcacatttccccgaaaagtgccagatacctgaaacaaaacccatcgtacggccaaggaagtctccaataactgtgatccaccacaagcgccagggttttcccagtcacgacgttgtaaaacgacggccagtcatgcataatccgcacgcatctggaataaggaagtgccattccgcctgacctttgcctatgaggaccaaaacgaaaaaacaccctttcgggtgtcttttctggaatttggtaccgagaggctccatgattcagtatgacttgcctttggtcgaaaaaaaaagcccgcactgtcaggtgcgggcttttttctgtgtttccttattaggacccactttcacatttaagttgtttttctaatccgcatatgatcaattcaaggccgaataagaaggctggctctgcaccttggtgatcaaataattcgatagcttgtcgtaataatggcggcatactatcagtagtaggtgtttccctttcttctttagcgacttgatgctcttgatcttccaatacgcaacctaaagtaaaatgccccacagcgctgagtgcatataatgcattctctagtgaaaaaccttgttggcataaaaaggctaattgattttcgagagtttcatactgtttttctgtaggccgtgtacctaaatgtacttttgctccatcgcgatgacttagtaaagcacatctaaaacttttagcgttattacgtaaaaaatcttgccagctttccccttctaaagggcaaaagtgagtatggtgcctatctaacatctcaatggctaaggcgtcgagcaaagcccgcttattttttacatgccaatacaatgtaggctgctctacacctagcttctgggcgagtttacgggttgttaaaccttcgattccgacctcattaagcagctctaatgcgctgttaatcactttacttttatctaatctggacatattcaccaccctgaattgactctcttccgggcgctatcatgccataccgcgaaaggttttgcgccattcgatggcgcgccgccattgcttgtgcaatgtacatcagagattttgagacacaaccaattattgaaggcctccctaacggggggcctttttttgtttctggtcccccgcttaacgatcgttggctgttttcagcaggacgcactgacctccctatcagtgatagagattgacatccctatcagtgatagagatactgagcacagctgtcaccggatgtgctttccggtctgatgagtccgtgaggacgaaacagcctctacaaataattttgtttaaatcacacgggtaaggaggtatttaaatgaaaacactgtcccaagcacagtcgaagacgagtagccagcagttttctttcaccggtaattctagcgctaacgtgattatcggcaaccagaaactaactatcaacgacgtcgcccgcgttgctcggaacgggaccttagtaagcctgactaacaacactgatatacttcaaggcattcaggcgtcctgtgattatatcaataacgcagttgagtctggtgaaccaatttacggtgtgacctcaggcttcggcggtatggcgaacgttgctatcagccgtgaacaggcctccgaactgcaagagaatattgtatggcatctgaaaactggtgctgggaacaaactccctttggcggacgtacgtgcagcaatgctgctgcgcgccaactcgcatatgcgtggcgcgtccggtatccgtctggagctgatcaaacgtatggaaatcttcttgaacgctggtgttactccgtacgtttatgaatttggatctatcggcgcttctggagatctggtcccgctgagctacattacgggttccctgattggccttgacccgagcttcaaggtggatttcaacggcaaagaaatggacgccccgaccgcgttacgccagttaaatctgtctcccctgacacttctgcctaaagaaggtctagctatggtgaatgggacctcagtcatgactggcatcgcagctaactgcgtatacgacacccagatcctgactgcgattgcaatgggtgttcacgctctggatatccaggccctgaacggcaccaaccagtctttccacccgtttatccataactctaagccgcacccaggtcagctgtgggcggctgatcagatgatatcattgctggctaactcgcaactggtacgggacgagctggacggcaaacatgattaccgcgaccacgagctgatccaggatcgttatagcctgcgttgccttccgcagtacctgggtccgattgtggacggtatctcacagatagcaaaacaaatcgaaattgaaattaactccgttactgataaccctctgattgacgtcgataaccaggcgtcgtaccacggcggaaatttcctgggtcagtatgttggcatgggtatggaccaccttcgctactatatcggcctgctggcgaaacacctggatgtgcagattgcgctgctagctagtcccgaatttagcaacggactgccgccatctttattgggcaaccgtgaacgtaaggttaacatgggtctgaaaggtttacaaatctgtggcaattccatcatgccgctgctgacgttctacggcaatagcatcgccgaccgctttccgacccatgcagagcaattcaaccagaatatcaactctcagggctacacctccgcaacgctggcgcgacgtagtgttgatatcttccaaaactacgttgcgattgccctgatgtttggcgtccaggctgtagacctgaggacttataaaaagactggccattacgatgcgcgtgcttgcctctctccggctaccgaacgcctgtattccgccgtgcgtcacgtagttggtcagaaacctacttcagatcgcccatacatctggaacgataacgagcagggtctggatgaacacatcgctcgcatctccgctgacattgccgctggcggagtaattgttcaagctgtacaggatatcctgccgtgcctgcactaaccggcttatcggtcagtttcacctgatttacgtaaaaacccgcttcggcgggtttttgcttttggaggggcagaaagatgaatgactgtccacgacgctatacccaaaagaaa

SEQ ID NO: 378 - DNA, 5122 bp, synthetic construct
  source 1..5122: mol_type = other DNA
aggctaggtggaggctcagtgatgataagtctgcgatggtggatgcatgtgtcatggtcatagctgtttcctgtgtgaaattgttatccgctcagagggcacaatcctattccgcgctatccgacaatctccaagacattaggtggagttcagttcggcgagcggaaatggcttacgaacggggcggagatttcctggaagatgccaggaagatacttaacagggaagtgagagggccgcggcaaagccgtttttccataggctccgcccccctgacaagcatcacgaaatctgacgctcaaatcagtggtggcgaaacccgacaggactataaagataccaggcgtttccccctggcggctccctcgtgcgctctcctgttcctgcctttcggtttaccggtgtcattccgctgttatggccgcgtttgtctcattccacgcctgacactcagttccgggtaggcagttcgctccaagctggactgtatgcacgaaccccccgttcagtccgaccgctgcgccttatccggtaactatcgtcttgagtccaacccggaaagacatgcaaaagcaccactggcagcagccactggtaattgatttagaggagttagtcttgaagtcatgcgccggttaaggctaaactgaaaggacaagttttggtgactgcgctcctccaagccagttacctcggttcaaagagttggtagctcagagaaccttcgaaaaaccgccctgcaaggcggttttttcgttttcagagcaagagattacgcgcagaccaaaacgatctcaagaagatcatcttattaagtctgacgctctattcaacaaagccgccgtccatgggtagggggcttcaaatcgtcctcgtgataccaattcggagcctgcttttttgtacaaacttgttgataatggcaattcaaggatcttcacctagatccttttaaattaaaaatgaagttttaaatcaatctaaagtatatatgagtaaacttggtctgacagttaccaatgcttaatcagtgaggcacctatctcagcgatctgtctatttcgttcatccatagttgcctgactccccgtcgtgtagataactacgatacgggagggcttaccatctggccccagtgctgcaatgataccgcgagagccacgctcaccggctccagatttatcagcaataaaccagccagccggaagggccgagcgcagaagtggtcctgcaactttatccgcctccatccagtctattaattgttgccgggaagctagagtaagtagttcgccagttaatagtttgcgcaacgttgttgccattgctacaggcatcgtggtgtcacgctcgtcgtttggtatggcttcattcagctccggttcccaacgatcaaggcgagttacatgatcccccatgttgtgcaaaaaagcggttagctccttcggtcctccgatcgttgtcagaagtaagttggccgcagtgttatcactcatggttatggcagcactgcataattctcttactgtcatgccatccgtaagatgcttttctgtgactggtgagtactcaaccaagtcattctgagaatagtgtatgcggcgaccgagttgctcttgcccggcgtcaatacgggataataccgcgccacatagcagaactttaaaagtgctcatcattggaaaacgttcttcggggcgaaaactctcaaggatcttaccgctgttgagatccagttcgatgtaacccactcgtgcacccaactgatcttcagcatcttttactttcaccagcgtttctgggtgagcaaaaacaggaaggcaaaatgccgcaaaaaagggaataagggcgacacggaaatgttgaatactcatactcttcctttttcaatattattgaagcatttatcagggttattgtctcatgagcggatacatatttgaatgtatttagaaaaataaacaaataggggttccgcgcacatttccccgaaaagtgccagatacctgaaacaaaacccatcgtacggccaaggaagtctccaataactgtgatccaccacaagcgccagggttttcccagtcacgacgttgtaaaacgacggccagtcatgcataatccgcacgcatctggaataaggaagtgccattccgcctgacctttgcctatgaggaccaaaacgaaaaaacaccctttcgggtgtcttttctggaatttggtaccgagaggctccatgattcagtatgacttgcctttggtcgaaaaaaaaagcccgcactgtcaggtgcgggcttttttctgtgtttccttattaggacccactttcacatttaagttgtttttctaatccgcatatgatcaattcaaggccgaataagaaggctggctctgcaccttggtgatcaaataattcgatagcttgtcgtaataatggcggcatactatcagtagtaggtgtttccctttcttctttagcgacttgatgctcttgatcttccaatacgcaacctaaagtaaaatgccccacagcgctgagtgcatataatgcattctctagtgaaaaaccttgttggcataaaaaggctaattgattttcgagagtttcatactgtttttctgtaggccgtgtacctaaatgtacttttgctccatcgcgatgacttagtaaagcacatctaaaacttttagcgttattacgtaaaaaatcttgccagctttccccttctaaagggcaaaagtgagtatggtgcctatctaacatctcaatggctaaggcgtcgagcaaagcccgcttattttttacatgccaatacaatgtaggctgctctacacctagcttctgggcgagtttacgggttgttaaaccttcgattccgacctcattaagcagctctaatgcgctgttaatcactttacttttatctaatctggacatattcaccaccctgaattgactctcttccgggcgctatcatgccataccgcgaaaggttttgcgccattcgatggcgcgccgccattgcttgtgcaatgtacatcagagattttgagacacaaccaattattgaaggcctccctaacggggggcctttttttgtttctggtcccccgcttaacgatcgttggctgttttcagcaggacgcactgacctccctatcagtgatagagattgacatccctatcagtgatagagatactgagcacagctgtcaccggatgtgctttccggtctgatgagtccgtgaggacgaaacagcctctacaaataattttgtttaaatcacacgggtaaggaggtatttaaatgaaaacactgtcccaagcacagtcgaagacgagtagccagcagttttctttcaccggtaattctagcgctaacgtgattatcggcaaccagaaactaactatcaacgacgtcgcccgcgttgctcggaacgggaccttagtaagcctgactaacaacactgatatacttcaaggcattcaggcgtcctgtgattatatcaataacgcagttgagtctggtgaaccaatttacggtgtgacctcaggcttcggcggtatggcgaacgttgctatcagccgtgaacaggcctccgaactgcaacacaatttggtatggcatacgaaaactggtgctgggaacaaactccctttggcggacgtacgtgcagcaatgctgctgcgcgccaactcgcatatgcgtggcgcgtccggtatccgtctggagctgatcaaacgtatggaaatcttcttgaacgctggtgttactccgtacgtttatgaatttggatctatcggcgcttctggagatctggtcccgctgagctacattacgggttccctgattggccttgacccgagcttcaaggtggatttcaacggcaaagaaatggacgccccgaccgcgttacgccagttaaatctgtctcccctgacacttctgcctaaagaagcgattgctatgcttaatgggacctcagtcatgactggcatcgcagctaactgcgtatacgacacccagatcctgactgcgattgcaatgggtgttcacgctctggatatccaggccctgaacggcaccaaccagtctttccacccgtttatccataactctaagccgcacccaggtcagctgtgggcggctgatcagatgatatcattgctggctaactcgcaactggtacgggacgagctggacggcaaacatgattaccgcgaccacgagctgatccaggatcgttatagcctgcgttgccttccgcagtacctgggtccgattgtggacggtatctcacagatagcaaaacaaatcgaaattgaaattaactccgttactgataaccctctgattgacgtcgataaccaggcgtcgtaccacggcggaaatttcctgggtcagtatgttggcatgggtatggaccaccttcgctactatatcggcctgctggcgaaacacctggatgtgcagattgcgctgctagctagtcccgaatttagcaacggactgccgccatctttattgggcaaccgtgaacgtaaggttaacatgggtctgaaaggtttacaaatctgtggcaattccatcatgccgctgctgacgttctacggcaatagcatcgccgaccgctttccgacccatgcagagcaattcaaccagaatatcaactctcagggctacacctccgcaacgctggcgcgacgtagtgttgatatcttccaaaactacgttgcgattgccctgatgtttggcgtccaggctgtagacctgaggacttataaaaagactggccattacgatgcgcgtgcttgcctctctccggctaccgaacgcctgtattccgccgtgcgtcacgtagttggtcagaaacctacttcagatcgcccatacatctggaacgataacgagcagggtctggatgaacacatcgctcgcatctccgctgacattgccgctggcggagtaattgttcaagctgtacaggatatcctgccgtgcctgcactaaccggcttatcggtcagtttcacctgatttacgtaaaaacccgcttcggcgggtttttgcttttggaggggcagaaagatgaatgactgtccacgacgctatacccaaaagaaa

SEQ ID NO: 379 - DNA, 5122 bp, synthetic construct
  source 1..5122: mol_type = other DNA
aggctaggtggaggctcagtgatgataagtctgcgatggtggatgcatgtgtcatggtcatagctgtttcctgtgtgaaattgttatccgctcagagggcacaatcctattccgcgctatccgacaatctccaagacattaggtggagttcagttcggcgagcggaaatggcttacgaacggggcggagatttcctggaagatgccaggaagatacttaacagggaagtgagagggccgcggcaaagccgtttttccataggctccgcccccctgacaagcatcacgaaatctgacgctcaaatcagtggtggcgaaacccgacaggactataaagataccaggcgtttccccctggcggctccctcgtgcgctctcctgttcctgcctttcggtttaccggtgtcattccgctgttatggccgcgtttgtctcattccacgcctgacactcagttccgggtaggcagttcgctccaagctggactgtatgcacgaaccccccgttcagtccgaccgctgcgccttatccggtaactatcgtcttgagtccaacccggaaagacatgcaaaagcaccactggcagcagccactggtaattgatttagaggagttagtcttgaagtcatgcgccggttaaggctaaactgaaaggacaagttttggtgactgcgctcctccaagccagttacctcggttcaaagagttggtagctcagagaaccttcgaaaaaccgccctgcaaggcggttttttcgttttcagagcaagagattacgcgcagaccaaaacgatctcaagaagatcatcttattaagtctgacgctctattcaacaaagccgccgtccatgggtagggggcttcaaatcgtcctcgtgataccaattcggagcctgcttttttgtacaaacttgttgataatggcaattcaaggatcttcacctagatccttttaaattaaaaatgaagttttaaatcaatctaaagtatatatgagtaaacttggtctgacagttaccaatgcttaatcagtgaggcacctatctcagcgatctgtctatttcgttcatccatagttgcctgactccccgtcgtgtagataactacgatacgggagggcttaccatctggccccagtgctgcaatgataccgcgagagccacgctcaccggctccagatttatcagcaataaaccagccagccggaagggccgagcgcagaagtggtcctgcaactttatccgcctccatccagtctattaattgttgccgggaagctagagtaagtagttcgccagttaatagtttgcgcaacgttgttgccattgctacaggcatcgtggtgtcacgctcgtcgtttggtatggcttcattcagctccggttcccaacgatcaaggcgagttacatgatcccccatgttgtgcaaaaaagcggttagctccttcggtcctccgatcgttgtcagaagtaagttggccgcagtgttatcactcatggttatggcagcactgcataattctcttactgtcatgccatccgtaagatgcttttctgtgactggtgagtactcaaccaagtcattctgagaatagtgtatgcggcgaccgagttgctcttgcccggcgtcaatacgggataataccgcgccacatagcagaactttaaaagtgctcatcattggaaaacgttcttcggggcgaaaactctcaaggatcttaccgctgttgagatccagttcgatgtaacccactcgtgcacccaactgatcttcagcatcttttactttcaccagcgtttctgggtgagcaaaaacaggaaggcaaaatgccgcaaaaaagggaataagggcgacacggaaatgttgaatactcatactcttcctttttcaatattattgaagcatttatcagggttattgtctcatgagcggatacatatttgaatgtatttagaaaaataaacaaataggggttccgcgcacatttccccgaaaagtgccagatacctgaaacaaaacccatcgtacggccaaggaagtctccaataactgtgatccaccacaagcgccagggttttcccagtcacgacgttgtaaaacgacggccagtcatgcataatccgcacgcatctggaataaggaagtgccattccgcctgacctttgcctatgaggaccaaaacgaaaaaacaccctttcgggtgtcttttctggaatttggtaccgagaggctccatgattcagtatgacttgcctttggtcgaaaaaaaaagcccgcactgtcaggtgcgggcttttttctgtgtttccttattaggacccactttcacatttaagttgtttttctaatccgcatatgatcaattcaaggccgaataagaaggctggctctgcaccttggtgatcaaataattcgatagcttgtcgtaataatggcggcatactatcagtagtaggtgtttccctttcttctttagcgacttgatgctcttgatcttccaatacgcaacctaaagtaaaatgccccacagcgctgagtgcatataatgcattctctagtgaaaaaccttgttggcataaaaaggctaattgattttcgagagtttcatactgtttttctgtaggccgtgtacctaaatgtacttttgctccatcgcgatgacttagtaaagcacatctaaaacttttagcgttattacgtaaaaaatcttgccagctttccccttctaaagggcaaaagtgagtatggtgcctatctaacatctcaatggctaaggcgtcgagcaaagcccgcttattttttacatgccaatacaatgtaggctgctctacacctagcttctgggcgagtttacgggttgttaaaccttcgattccgacctcattaagcagctctaatgcgctgttaatcactttacttttatctaatctggacatattcaccaccctgaattgactctcttccgggcgctatcatgccataccgcgaaaggttttgcgccattcgatggcgcgccgccattgcttgtgcaatgtacatcagagattttgagacacaaccaattattgaaggcctccctaacggggggcctttttttgtttctggtcccccgcttaacgatcgttggctgttttcagcaggacgcactgacctccctatcagtgatagagattgacatccctatcagtgatagagatactgagcacagctgtcaccggatgtgctttccggtctgatgagtccgtgaggacgaaacagcctctacaaataattttgtttaaatcacacgggtaaggaggtatttaaatgaaaacactgtcccaagcacagtcgaagacgagtagccagcagttttctttcaccggtaattctagcgctaacgtgattatcggcaaccagaaactaactatcaacgacgtcgcccgcgttgctcggaacgggaccttagtaagcctgactaacaacactgatatacttcaaggcattcaggcgtcctgtgattatatcaataacgcagttgagtctggtgaaccaatttacggtgtgacctcaggcttcggcggtatggcgaacgttgctatcagccgtgaacaggcctccgaactgcaaaccaatatggtatggtttgtcaaaactggtgctgggaacaaactccctttggcggacgtacgtgcagcaatgctgctgcgcgccaactcgcatatgcgtggcgcgtccggtatccgtctggagctgatcaaacgtatggaaatcttcttgaacgctggtgttactccgtacgtttatgaatttggatctatcggcgcttctggagatctggtcccgctgagctacattacgggttccctgattggccttgacccgagcttcaaggtggatttcaacggcaaagaaatggacgccccgaccgcgttacgccagttaaatctgtctcccctgacacttctgcctaaagaaggtattgctatgacgaatgggacctcagtcatgactggcatcgcagctaactgcgtatacgacacccagatcctgactgcgattgcaatgggtgttcacgctctggatatccaggccctgaacggcaccaaccagtctttccacccgtttatccataactctaagccgcacccaggtcagctgtgggcggctgatcagatgatatcattgctggctaactcgcaactggtacgggacgagctggacggcaaacatgattaccgcgaccacgagctgatccaggatcgttatagcctgcgttgccttccgcagtacctgggtccgattgtggacggtatctcacagatagcaaaacaaatcgaaattgaaattaactccgttactgataaccctctgattgacgtcgataaccaggcgtcgtaccacggcggaaatttcctgggtcagtatgttggcatgggtatggaccaccttcgctactatatcggcctgctggcgaaacacctggatgtgcagattgcgctgctagctagtcccgaatttagcaacggactgccgccatctttattgggcaaccgtgaacgtaaggttaacatgggtctgaaaggtttacaaatctgtggcaattccatcatgccgctgctgacgttctacggcaatagcatcgccgaccgctttccgacccatgcagagcaattcaaccagaatatcaactctcagggctacacctccgcaacgctggcgcgacgtagtgttgatatcttccaaaactacgttgcgattgccctgatgtttggcgtccaggctgtagacctgaggacttataaaaagactggccattacgatgcgcgtgcttgcctctctccggctaccgaacgcctgtattccgccgtgcgtcacgtagttggtcagaaacctacttcagatcgcccatacatctggaacgataacgagcagggtctggatgaacacatcgctcgcatctccgctgacattgccgctggcggagtaattgttcaagctgtacaggatatcctgccgtgcctgcactaaccggcttatcggtcagtttcacctgatttacgtaaaaacccgcttcggcgggtttttgcttttggaggggcagaaagatgaatgactgtccacgacgctatacccaaaagaaa

SEQ ID NO: 380 - DNA, 5122 bp, synthetic construct
  source 1..5122: mol_type = other DNA
aggctaggtggaggctcagtgatgataagtctgcgatggtggatgcatgtgtcatggtcatagctgtttcctgtgtgaaattgttatccgctcagagggcacaatcctattccgcgctatccgacaatctccaagacattaggtggagttcagttcggcgagcggaaatggcttacgaacggggcggagatttcctggaagatgccaggaagatacttaacagggaagtgagagggccgcggcaaagccgtttttccataggctccgcccccctgacaagcatcacgaaatctgacgctcaaatcagtggtggcgaaacccgacaggactataaagataccaggcgtttccccctggcggctccctcgtgcgctctcctgttcctgcctttcggtttaccggtgtcattccgctgttatggccgcgtttgtctcattccacgcctgacactcagttccgggtaggcagttcgctccaagctggactgtatgcacgaaccccccgttcagtccgaccgctgcgccttatccggtaactatcgtcttgagtccaacccggaaagacatgcaaaagcaccactggcagcagccactggtaattgatttagaggagttagtcttgaagtcatgcgccggttaaggctaaactgaaaggacaagttttggtgactgcgctcctccaagccagttacctcggttcaaagagttggtagctcagagaaccttcgaaaaaccgccctgcaaggcggttttttcgttttcagagcaagagattacgcgcagaccaaaacgatctcaagaagatcatcttattaagtctgacgctctattcaacaaagccgccgtccatgggtagggggcttcaaatcgtcctcgtgataccaattcggagcctgcttttttgtacaaacttgttgataatggcaattcaaggatcttcacctagatccttttaaattaaaaatgaagttttaaatcaatctaaagtatatatgagtaaacttggtctgacagttaccaatgcttaatcagtgaggcacctatctcagcgatctgtctatttcgttcatccatagttgcctgactccccgtcgtgtagataactacgatacgggagggcttaccatctggccccagtgctgcaatgataccgcgagagccacgctcaccggctccagatttatcagcaataaaccagccagccggaagggccgagcgcagaagtggtcctgcaactttatccgcctccatccagtctattaattgttgccgggaagctagagtaagtagttcgccagttaatagtttgcgcaacgttgttgccattgctacaggcatcgtggtgtcacgctcgtcgtttggtatggcttcattcagctccggttcccaacgatcaaggcgagttacatgatcccccatgttgtgcaaaaaagcggttagctccttcggtcctccgatcgttgtcagaagtaagttggccgcagtgttatcactcatggttatggcagcactgcataattctcttactgtcatgccatccgtaagatgcttttctgtgactggtgagtactcaaccaagtcattctgagaatagtgtatgcggcgaccgagttgctcttgcccggcgtcaatacgggataataccgcgccacatagcagaactttaaaagtgctcatcattggaaaacgttcttcggggcgaaaactctcaaggatcttaccgctgttgagatccagttcgatgtaacccactcgtgcacccaactgatcttcagcatcttttactttcaccagcgtttctgggtgagcaaaaacaggaaggcaaaatgccgcaaaaaagggaataagggcgacacggaaatgttgaatactcatactcttcctttttcaatattattgaagcatttatcagggttattgtctcatgagcggatacatatttgaatgtatttagaaaaataaacaaataggggttccgcgcacatttccccgaaaagtgccagatacctgaaacaaaacccatcgtacggccaaggaagtctccaataactgtgatccaccacaagcgccagggttttcccagtcacgacgttgtaaaacgacggccagtcatgcataatccgcacgcatctggaataaggaagtgccattccgcctgacctttgcctatgaggaccaaaacgaaaaaacaccctttcgggtgtcttttctggaatttggtaccgagaggctccatgattcagtatgacttgcctttggtcgaaaaaaaaagcccgcactgtcaggtgcgggcttttttctgtgtttccttattaggacccactttcacatttaagttgtttttctaatccgcatatgatcaattcaaggccgaataagaaggctggctctgcaccttggtgatcaaataattcgatagcttgtcgtaataatggcggcatactatcagtagtaggtgtttccctttcttctttagcgacttgatgctcttgatcttccaatacgcaacctaaagtaaaatgccccacagcgctgagtgcatataatgcattctctagtgaaaaaccttgttggcataaaaaggctaattgattttcgagagtttcatactgtttttctgtaggccgtgtacctaaatgtacttttgctccatcgcgatgacttagtaaagcacatctaaaacttttagcgttattacgtaaaaaatcttgccagctttccccttctaaagggcaaaagtgagtatggtgcctatctaacatctcaatggctaaggcgtcgagcaaagcccgcttattttttacatgccaatacaatgtaggctgctctacacctagcttctgggcgagtttacgggttgttaaaccttcgattccgacctcattaagcagctctaatgcgctgttaatcactttacttttatctaatctggacatattcaccaccctgaattgactctcttccgggcgctatcatgccataccgcgaaaggttttgcgccattcgatggcgcgccgccattgcttgtgcaatgtacatcagagattttgagacacaaccaattattgaaggcctccctaacggggggcctttttttgtttctggtcccccgcttaacgatcgttggctgttttcagcaggacgcactgacctccctatcagtgatagagattgacatccctatcagtgatagagatactgagcacagctgtcaccggatgtgctttccggtctgatgagtccgtgaggacgaaacagcctctacaaataattttgtttaaatcacacgggtaaggaggtatttaaatgaaaacactgtcccaagcacagtcgaagacgagtagccagcagttttctttcaccggtaattctagcgctaacgtgattatcggcaaccagaaactaactatcaacgacgtcgcccgcgttgctcggaacgggaccttagtaagcctgactaacaacactgatatacttcaaggcattcaggcgtcctgtgattatatcaataacgcagttgagtctggtgaaccaatttacggtgtgacctcaggcttcggcggtatggcgaacgttgctatcagccgtgaacaggcctccgaactgcaaaagaatatggtatggtttcacaaaactggtgctgggaacaaactccctttggcggacgtacgtgcagcaatgctgctgcgcgccaactcgcatatgcgtggcgcgtccggtatccgtctggagctgatcaaacgtatggaaatcttcttgaacgctggtgttactccgtacgtttatgaatttggatctatcggcgcttctggagatctggtcccgctgagctacattacgggttccctgattggccttgacccgagcttcaaggtggatttcaacggcaaagaaatggacgccccgaccgcgttacgccagttaaatctgtctcccctgacacttctgcctaaagaagccctagctatgctcaatgggacctcagtcatgactggcatcgcagctaactgcgtatacgacacccagatcctgactgcgattgcaatgggtgttcacgctctggatatccaggccctgaacggcaccaaccagtctttccacccgtttatccataactctaagccgcacccaggtcagctgtgggcggctgatcagatgatatcattgctggctaactcgcaactggtacgggacgagctggacggcaaacatgattaccgcgaccacgagctgatccaggatcgttatagcctgcgttgccttccgcagtacctgggtccgattgtggacggtatctcacagatagcaaaacaaatcgaaattgaaattaactccgttactgataaccctctgattgacgtcgataaccaggcgtcgtaccacggcggaaatttcctgggtcagtatgttggcatgggtatggaccaccttcgctactatatcggcctgctggcgaaacacctggatgtgcagattgcgctgctagctagtcccgaatttagcaacggactgccgccatctttattgggcaaccgtgaacgtaaggttaacatgggtctgaaaggtttacaaatctgtggcaattccatcatgccgctgctgacgttctacggcaatagcatcgccgaccgctttccgacccatgcagagcaattcaaccagaatatcaactctcagggctacacctccgcaacgctggcgcgacgtagtgttgatatcttccaaaactacgttgcgattgccctgatgtttggcgtccaggctgtagacctgaggacttataaaaagactggccattacgatgcgcgtgcttgcctctctccggctaccgaacgcctgtattccgccgtgcgtcacgtagttggtcagaaacctacttcagatcgcccatacatctggaacgataacgagcagggtctggatgaacacatcgctcgcatctccgctgacattgccgctggcggagtaattgttcaagctgtacaggatatcctgccgtgcctgcactaaccggcttatcggtcagtttcacctgatttacgtaaaaacccgcttcggcgggtttttgcttttggaggggcagaaagatgaatgactgtccacgacgctatacccaaaagaaa

SEQ ID NO: 381 - DNA, 5122 bp, synthetic construct
  source 1..5122: mol_type = other DNA
aggctaggtggaggctcagtgatgataagtctgcgatggtggatgcatgtgtcatggtcatagctgtttcctgtgtgaaattgttatccgctcagagggcacaatcctattccgcgctatccgacaatctccaagacattaggtggagttcagttcggcgagcggaaatggcttacgaacggggcggagatttcctggaagatgccaggaagatacttaacagggaagtgagagggccgcggcaaagccgtttttccataggctccgcccccctgacaagcatcacgaaatctgacgctcaaatcagtggtggcgaaacccgacaggactataaagataccaggcgtttccccctggcggctccctcgtgcgctctcctgttcctgcctttcggtttaccggtgtcattccgctgttatggccgcgtttgtctcattccacgcctgacactcagttccgggtaggcagttcgctccaagctggactgtatgcacgaaccccccgttcagtccgaccgctgcgccttatccggtaactatcgtcttgagtccaacccggaaagacatgcaaaagcaccactggcagcagccactggtaattgatttagaggagttagtcttgaagtcatgcgccggttaaggctaaactgaaaggacaagttttggtgactgcgctcctccaagccagttacctcggttcaaagagttggtagctcagagaaccttcgaaaaaccgccctgcaaggcggttttttcgttttcagagcaagagattacgcgcagaccaaaacgatctcaagaagatcatcttattaagtctgacgctctattcaacaaagccgccgtccatgggtagggggcttcaaatcgtcctcgtgataccaattcggagcctgcttttttgtacaaacttgttgataatggcaattcaaggatcttcacctagatccttttaaattaaaaatgaagttttaaatcaatctaaagtatatatgagtaaacttggtctgacagttaccaatgcttaatcagtgaggcacctatctcagcgatctgtctatttcgttcatccatagttgcctgactccccgtcgtgtagataactacgatacgggagggcttaccatctggccccagtgctgcaatgataccgcgagagccacgctcaccggctccagatttatcagcaataaaccagccagccggaagggccgagcgcagaagtggtcctgcaactttatccgcctccatccagtctattaattgttgccgggaagctagagtaagtagttcgccagttaatagtttgcgcaacgttgttgccattgctacaggcatcgtggtgtcacgctcgtcgtttggtatggcttcattcagctccggttcccaacgatcaaggcgagttacatgatcccccatgttgtgcaaaaaagcggttagctccttcggtcctccgatcgttgtcagaagtaagttggccgcagtgttatcactcatggttatggcagcactgcataattctcttactgtcatgccatccgtaagatgcttttctgtgactggtgagtactcaaccaagtcattctgagaatagtgtatgcggcgaccgagttgctcttgcccggcgtcaatacgggataataccgcgccacatagcagaactttaaaagtgctcatcattggaaaacgttcttcggggcgaaaactctcaaggatcttaccgctgttgagatccagttcgatgtaacccactcgtgcacccaactgatcttcagcatcttttactttcaccagcgtttctgggtgagcaaaaacaggaaggcaaaatgccgcaaaaaagggaataagggcgacacggaaatgttgaatactcatactcttcctttttcaatattattgaagcatttatcagggttattgtctcatgagcggatacatatttgaatgtatttagaaaaataaacaaataggggttccgcgcacatttccccgaaaagtgccagatacctgaaacaaaacccatcgtacggccaaggaagtctccaataactgtgatccaccacaagcgccagggttttcccagtcacgacgttgtaaaacgacggccagtcatgcataatccgcacgcatctggaataaggaagtgccattccgcctgacctttgcctatgaggaccaaaacgaaaaaacaccctttcgggtgtcttttctggaatttggtaccgagaggctccatgattcagtatgacttgcctttggtcgaaaaaaaaagcccgcactgtcaggtgcgggcttttttctgtgtttccttattaggacccactttcacatttaagttgtttttctaatccgcatatgatcaattcaaggccgaataagaaggctggctctgcaccttggtgatcaaataattcgatagcttgtcgtaataatggcggcatactatcagtagtaggtgtttccctttcttctttagcgacttgatgctcttgatcttccaatacgcaacctaaagtaaaatgccccacagcgctgagtgcatataatgcattctctagtgaaaaaccttgttggcataaaaaggctaattgattttcgagagtttcatactgtttttctgtaggccgtgtacctaaatgtacttttgctccatcgcgatgacttagtaaagcacatctaaaacttttagcgttattacgtaaaaaatcttgccagctttccccttctaaagggcaaaagtgagtatggtgcctatctaacatctcaatggctaaggcgtcgagcaaagcccgcttattttttacatgccaatacaatgtaggctgctctacacctagcttctgggcgagtttacgggttgttaaaccttcgattccgacctcattaagcagctctaatgcgctgttaatcactttacttttatctaatctggacatattcaccaccctgaattgactctcttccgggcgctatcatgccataccgcgaaaggttttgcgccattcgatggcgcgccgccattgcttgtgcaatgtacatcagagattttgagacacaaccaattattgaaggcctccctaacggggggcctttttttgtttctggtcccccgcttaacgatcgttggctgttttcagcaggacgcactgacctccctatcagtgatagagattgacatccctatcagtgatagagatactgagcacagctgtcaccggatgtgctttccggtctgatgagtccgtgaggacgaaacagcctctacaaataattttgtttaaatcacacgggtaaggaggtatttaaatgaaaacactgtcccaagcacagtcgaagacgagtagccagcagttttctttcaccggtaattctagcgctaacgtgattatcggcaaccagaaactaactatcaacgacgtcgcccgcgttgctcggaacgggaccttagtaagcctgactaacaacactgatatacttcaaggcattcaggcgtcctgtgattatatcaataacgcagttgagtctggtgaaccaatttacggtgtgacctcaggcttcggcggtatggcgaacgttgctatcagccgtgaacaggcctccgaactgcaacataatttggtatggtttcacaaaactggtgctgggaacaaactccctttggcggacgtacgtgcagcaatgctgctgcgcgccaactcgcatatgcgtggcgcgtccggtatccgtctggagctgatcaaacgtatggaaatcttcttgaacgctggtgttactccgtacgtttatgaatttggatctatcggcgcttctggagatctggtcccgctgagctacattacgggttccctgattggccttgacccgagcttcaaggtggatttcaacggcaaagaaatggacgccccgaccgcgttacgccagttaaatctgtctcccctgacacttctgcctaaagaatcactagctatgatgaatgggacctcagtcatgactggcatcgcagctaactgcgtatacgacacccagatcctgactgcgattgcaatgggtgttcacgctctggatatccaggccctgaacggcaccaaccagtctttccacccgtttatccataactctaagccgcacccaggtcagctgtgggcggctgatcagatgatatcattgctggctaactcgcaactggtacgggacgagctggacggcaaacatgattaccgcgaccacgagctgatccaggatcgttatagcctgcgttgccttccgcagtacctgggtccgattgtggacggtatctcacagatagcaaaacaaatcgaaattgaaattaactccgttactgataaccctctgattgacgtcgataaccaggcgtcgtaccacggcggaaatttcctgggtcagtatgttggcatgggtatggaccaccttcgctactatatcggcctgctggcgaaacacctggatgtgcagattgcgctgctagctagtcccgaatttagcaacggactgccgccatctttattgggcaaccgtgaacgtaaggttaacatgggtctgaaaggtttacaaatctgtggcaattccatcatgccgctgctgacgttctacggcaatagcatcgccgaccgctttccgacccatgcagagcaattcaaccagaatatcaactctcagggctacacctccgcaacgctggcgcgacgtagtgttgatatcttccaaaactacgttgcgattgccctgatgtttggcgtccaggctgtagacctgaggacttataaaaagactggccattacgatgcgcgtgcttgcctctctccggctaccgaacgcctgtattccgccgtgcgtcacgtagttggtcagaaacctacttcagatcgcccatacatctggaacgataacgagcagggtctggatgaacacatcgctcgcatctccgctgacattgccgctggcggagtaattgttcaagctgtacaggatatcctgccgtgcctgcactaaccggcttatcggtcagtttcacctgatttacgtaaaaacccgcttcggcgggtttttgcttttggaggggcagaaagatgaatgactgtccacgacgctatacccaaaagaaa

SEQ ID NO: 382 - DNA, 5122 bp, synthetic construct
  source 1..5122: mol_type = other DNA
aggctaggtggaggctcagtgatgataagtctgcgatggtggatgcatgtgtcatggtcatagctgtttcctgtgtgaaattgttatccgctcagagggcacaatcctattccgcgctatccgacaatctccaagacattaggtggagttcagttcggcgagcggaaatggcttacgaacggggcggagatttcctggaagatgccaggaagatacttaacagggaagtgagagggccgcggcaaagccgtttttccataggctccgcccccctgacaagcatcacgaaatctgacgctcaaatcagtggtggcgaaacccgacaggactataaagataccaggcgtttccccctggcggctccctcgtgcgctctcctgttcctgcctttcggtttaccggtgtcattccgctgttatggccgcgtttgtctcattccacgcctgacactcagttccgggtaggcagttcgctccaagctggactgtatgcacgaaccccccgttcagtccgaccgctgcgccttatccggtaactatcgtcttgagtccaacccggaaagacatgcaaaagcaccactggcagcagccactggtaattgatttagaggagttagtcttgaagtcatgcgccggttaaggctaaactgaaaggacaagttttggtgactgcgctcctccaagccagttacctcggttcaaagagttggtagctcagagaaccttcgaaaaaccgccctgcaaggcggttttttcgttttcagagcaagagattacgcgcagaccaaaacgatctcaagaagatcatcttattaagtctgacgctctattcaacaaagccgccgtccatgggtagggggcttcaaatcgtcctcgtgataccaattcggagcctgcttttttgtacaaacttgttgataatggcaattcaaggatcttcacctagatccttttaaattaaaaatgaagttttaaatcaatctaaagtatatatgagtaaacttggtctgacagttaccaatgcttaatcagtgaggcacctatctcagcgatctgtctatttcgttcatccatagttgcctgactccccgtcgtgtagataactacgatacgggagggcttaccatctggccccagtgctgcaatgataccgcgagagccacgctcaccggctccagatttatcagcaataaaccagccagccggaagggccgagcgcagaagtggtcctgcaactttatccgcctccatccagtctattaattgttgccgggaagctagagtaagtagttcgccagttaatagtttgcgcaacgttgttgccattgctacaggcatcgtggtgtcacgctcgtcgtttggtatggcttcattcagctccggttcccaacgatcaaggcgagttacatgatcccccatgttgtgcaaaaaagcggttagctccttcggtcctccgatcgttgtcagaagtaagttggccgcagtgttatcactcatggttatggcagcactgcataattctcttactgtcatgccatccgtaagatgcttttctgtgactggtgagtactcaaccaagtcattctgagaatagtgtatgcggcgaccgagttgctcttgcccggcgtcaatacgggataataccgcgccacatagcagaactttaaaagtgctcatcattggaaaacgttcttcggggcgaaaactctcaaggatcttaccgctgttgagatccagttcgatgtaacccactcgtgcacccaactgatcttcagcatcttttactttcaccagcgtttctgggtgagcaaaaacaggaaggcaaaatgccgcaaaaaagggaataagggcgacacggaaatgttgaatactcatactcttcctttttcaatattattgaagcatttatcagggttattgtctcatgagcggatacatatttgaatgtatttagaaaaataaacaaataggggttccgcgcacatttccccgaaaagtgccagatacctgaaacaaaacccatcgtacggccaaggaagtctccaataactgtgatccaccacaagcgccagggttttcccagtcacgacgttgtaaaacgacggccagtcatgcataatccgcacgcatctggaataaggaagtgccattccgcctgacctttgcctatgaggaccaaaacgaaaaaacaccctttcgggtgtcttttctggaatttggtaccgagaggctccatgattcagtatgacttgcctttggtcgaaaaaaaaagcccgcactgtcaggtgcgggcttttttctgtgtttccttattaggacccactttcacatttaagttgtttttctaatccgcatatgatcaattcaaggccgaataagaaggctggctctgcaccttggtgatcaaataattcgatagcttgtcgtaataatggcggcatactatcagtagtaggtgtttccctttcttctttagcgacttgatgctcttgatcttccaatacgcaacctaaagtaaaatgccccacagcgctgagtgcatataatgcattctctagtgaaaaaccttgttggcataaaaaggctaattgattttcgagagtttcatactgtttttctgtaggccgtgtacctaaatgtacttttgctccatcgcgatgacttagtaaagcacatctaaaacttttagcgttattacgtaaaaaatcttgccagctttccccttctaaagggcaaaagtgagtatggtgcctatctaacatctcaatggctaaggcgtcgagcaaagcccgcttattttttacatgccaatacaatgtaggctgctctacacctagcttctgggcgagtttacgggttgttaaaccttcgattccgacctcattaagcagctctaatgcgctgttaatcactttacttttatctaatctggacatattcaccaccctgaattgactctcttccgggcgctatcatgccataccgcgaaaggttttgcgccattcgatggcgcgccgccattgcttgtgcaatgtacatcagagattttgagacacaaccaattattgaaggcctccctaacggggggcctttttttgtttctggtcccccgcttaacgatcgttggctgttttcagcaggacgcactgacctccctatcagtgatagagattgacatccctatcagtgatagagatactgagcacagctgtcaccggatgtgctttccggtctgatgagtccgtgaggacgaaacagcctctacaaataattttgtttaaatcacacgggtaaggaggtatttaaatgaaaacactgtcccaagcacagtcgaagacgagtagccagcagttttctttcaccggtaattctagcgctaacgtgattatcggcaaccagaaactaactatcaacgacgtcgcccgcgttgctcggaacgggaccttagtaagcctgactaacaacactgatatacttcaaggcattcaggcgtcctgtgattatatcaataacgcagttgagtctggtgaaccaatttacggtgtgacctcaggcttcggcggtatggcgaacgttgctatcagccgtgaacaggcctccgaactgcaagagaatttggtatggtatcacaaaactggtgctgggaacaaactccctttggcggacgtacgtgcagcaatgctgctgcgcgccaactcgcatatgcgtggcgcgtccggtatccgtctggagctgatcaaacgtatggaaatcttcttgaacgctggtgttactccgtacgtttatgaatttggatctatcggcgcttctggagatctggtcccgctgagctacattacgggttccctgattggccttgacccgagcttcaaggtggatttcaacggcaaagaaatggacgccccgaccgcgttacgccagttaaatctgtctcccctgacacttctgcctaaagaaagtattgctatgatgaatgggacctcagtcatgactggcatcgcagctaactgcgtatacgacacccagatcctgactgcgattgcaatgggtgttcacgctctggatatccaggccctgaacggcaccaaccagtctttccacccgtttatccataactctaagccgcacccaggtcagctgtgggcggctgatcagatgatatcattgctggctaactcgcaactggtacgggacgagctggacggcaaacatgattaccgcgaccacgagctgatccaggatcgttatagcctgcgttgccttccgcagtacctgggtccgattgtggacggtatctcacagatagcaaaacaaatcgaaattgaaattaactccgttactgataaccctctgattgacgtcgataaccaggcgtcgtaccacggcggaaatttcctgggtcagtatgttggcatgggtatggaccaccttcgctactatatcggcctgctggcgaaacacctggatgtgcagattgcgctgctagctagtcccgaatttagcaacggactgccgccatctttattgggcaaccgtgaacgtaaggttaacatgggtctgaaaggtttacaaatctgtggcaattccatcatgccgctgctgacgttctacggcaatagcatcgccgaccgctttccgacccatgcagagcaattcaaccagaatatcaactctcagggctacacctccgcaacgctggcgcgacgtagtgttgatatcttccaaaactacgttgcgattgccctgatgtttggcgtccaggctgtagacctgaggacttataaaaagactggccattacgatgcgcgtgcttgcctctctccggctaccgaacgcctgtattccgccgtgcgtcacgtagttggtcagaaacctacttcagatcgcccatacatctggaacgataacgagcagggtctggatgaacacatcgctcgcatctccgctgacattgccgctggcggagtaattgttcaagctgtacaggatatcctgccgtgcctgcactaaccggcttatcggtcagtttcacctgatttacgtaaaaacccgcttcggcgggtttttgcttttggaggggcagaaagatgaatgactgtccacgacgctatacccaaaagaaa

SEQ ID NO: 383 - DNA, 5122 bp, synthetic construct
  source 1..5122: mol_type = other DNA
aggctaggtggaggctcagtgatgataagtctgcgatggtggatgcatgtgtcatggtcatagctgtttcctgtgtgaaattgttatccgctcagagggcacaatcctattccgcgctatccgacaatctccaagacattaggtggagttcagttcggcgagcggaaatggcttacgaacggggcggagatttcctggaagatgccaggaagatacttaacagggaagtgagagggccgcggcaaagccgtttttccataggctccgcccccctgacaagcatcacgaaatctgacgctcaaatcagtggtggcgaaacccgacaggactataaagataccaggcgtttccccctggcggctccctcgtgcgctctcctgttcctgcctttcggtttaccggtgtcattccgctgttatggccgcgtttgtctcattccacgcctgacactcagttccgggtaggcagttcgctccaagctggactgtatgcacgaaccccccgttcagtccgaccgctgcgccttatccggtaactatcgtcttgagtccaacccggaaagacatgcaaaagcaccactggcagcagccactggtaattgatttagaggagttagtcttgaagtcatgcgccggttaaggctaaactgaaaggacaagttttggtgactgcgctcctccaagccagttacctcggttcaaagagttggtagctcagagaaccttcgaaaaaccgccctgcaaggcggttttttcgttttcagagcaagagattacgcgcagaccaaaacgatctcaagaagatcatcttattaagtctgacgctctattcaacaaagccgccgtccatgggtagggggcttcaaatcgtcctcgtgataccaattcggagcctgcttttttgtacaaacttgttgataatggcaattcaaggatcttcacctagatccttttaaattaaaaatgaagttttaaatcaatctaaagtatatatgagtaaacttggtctgacagttaccaatgcttaatcagtgaggcacctatctcagcgatctgtctatttcgttcatccatagttgcctgactccccgtcgtgtagataactacgatacgggagggcttaccatctggccccagtgctgcaatgataccgcgagagccacgctcaccggctccagatttatcagcaataaaccagccagccggaagggccgagcgcagaagtggtcctgcaactttatccgcctccatccagtctattaattgttgccgggaagctagagtaagtagttcgccagttaatagtttgcgcaacgttgttgccattgctacaggcatcgtggtgtcacgctcgtcgtttggtatggcttcattcagctccggttcccaacgatcaaggcgagttacatgatcccccatgttgtgcaaaaaagcggttagctccttcggtcctccgatcgttgtcagaagtaagttggccgcagtgttatcactcatggttatggcagcactgcataattctcttactgtcatgccatccgtaagatgcttttctgtgactggtgagtactcaaccaagtcattctgagaatagtgtatgcggcgaccgagttgctcttgcccggcgtcaatacgggataataccgcgccacatagcagaactttaaaagtgctcatcattggaaaacgttcttcggggcgaaaactctcaaggatcttaccgctgttgagatccagttcgatgtaacccactcgtgcacccaactgatcttcagcatcttttactttcaccagcgtttctgggtgagcaaaaacaggaaggcaaaatgccgcaaaaaagggaataagggcgacacggaaatgttgaatactcatactcttcctttttcaatattattgaagcatttatcagggttattgtctcatgagcggatacatatttgaatgtatttagaaaaataaacaaataggggttccgcgcacatttccccgaaaagtgccagatacctgaaacaaaacccatcgtacggccaaggaagtctccaataactgtgatccaccacaagcgccagggttttcccagtcacgacgttgtaaaacgacggccagtcatgcataatccgcacgcatctggaataaggaagtgccattccgcctgacctttgcctatgaggaccaaaacgaaaaaacaccctttcgggtgtcttttctggaatttggtaccgagaggctccatgattcagtatgacttgcctttggtcgaaaaaaaaagcccgcactgtcaggtgcgggcttttttctgtgtttccttattaggacccactttcacatttaagttgtttttctaatccgcatatgatcaattcaaggccgaataagaaggctggctctgcaccttggtgatcaaataattcgatagcttgtcgtaataatggcggcatactatcagtagtaggtgtttccctttcttctttagcgacttgatgctcttgatcttccaatacgcaacctaaagtaaaatgccccacagcgctgagtgcatataatgcattctctagtgaaaaaccttgttggcataaaaaggctaattgattttcgagagtttcatactgtttttctgtaggccgtgtacctaaatgtacttttgctccatcgcgatgacttagtaaagcacatctaaaacttttagcgttattacgtaaaaaatcttgccagctttccccttctaaagggcaaaagtgagtatggtgcctatctaacatctcaatggctaaggcgtcgagcaaagcccgcttattttttacatgccaatacaatgtaggctgctctacacctagcttctgggcgagtttacgggttgttaaaccttcgattccgacctcattaagcagctctaatgcgctgttaatcactttacttttatctaatctggacatattcaccaccctgaattgactctcttccgggcgctatcatgccataccgcgaaaggttttgcgccattcgatggcgcgccgccattgcttgtgcaatgtacatcagagattttgagacacaaccaattattgaaggcctccctaacggggggcctttttttgtttctggtcccccgcttaacgatcgttggctgttttcagcaggacgcactgacctccctatcagtgatagagattgacatccctatcagtgatagagatactgagcacagctgtcaccggatgtgctttccggtctgatgagtccgtgaggacgaaacagcctctacaaataattttgtttaaatcacacgggtaaggaggtatttaaatgaaaacactgtcccaagcacagtcgaagacgagtagccagcagttttctttcaccggtaattctagcgctaacgtgattatcggcaaccagaaactaactatcaacgacgtcgcccgcgttgctcggaacgggaccttagtaagcctgactaacaacactgatatacttcaaggcattcaggcgtcctgtgattatatcaataacgcagttgagtctggtgaaccaatttacggtgtgacctcaggcttcggcggtatggcgaacgttgctatcagccgtgaacaggcctccgaactgcaagagaatttggtatggtatacgaaaactggtgctgggaacaaactccctttggcggacgtacgtgcagcaatgctgctgcgcgccaactcgcatatgcgtggcgcgtccggtatccgtctggagctgatcaaacgtatggaaatcttcttgaacgctggtgttactccgtacgtttatgaatttggatctatcggcgcttctggagatctggtcccgctgagctacattacgggttccctgattggccttgacccgagcttcaaggtggatttcaacggcaaagaaatggacgccccgaccgcgttacgccagttaaatctgtctcccctgacacttctgcctaaagaagccctagctatgttaaatgggacctcagtcatgactggcatcgcagctaactgcgtatacgacacccagatcctgactgcgattgcaatgggtgttcacgctctggatatccaggccctgaacggcaccaaccagtctttccacccgtttatccataactctaagccgcacccaggtcagctgtgggcggctgatcagatgatatcattgctggctaactcgcaactggtacgggacgagctggacggcaaacatgattaccgcgaccacgagctgatccaggatcgttatagcctgcgttgccttccgcagtacctgggtccgattgtggacggtatctcacagatagcaaaacaaatcgaaattgaaattaactccgttactgataaccctctgattgacgtcgataaccaggcgtcgtaccacggcggaaatttcctgggtcagtatgttggcatgggtatggaccaccttcgctactatatcggcctgctggcgaaacacctggatgtgcagattgcgctgctagctagtcccgaatttagcaacggactgccgccatctttattgggcaaccgtgaacgtaaggttaacatgggtctgaaaggtttacaaatctgtggcaattccatcatgccgctgctgacgttctacggcaatagcatcgccgaccgctttccgacccatgcagagcaattcaaccagaatatcaactctcagggctacacctccgcaacgctggcgcgacgtagtgttgatatcttccaaaactacgttgcgattgccctgatgtttggcgtccaggctgtagacctgaggacttataaaaagactggccattacgatgcgcgtgcttgcctctctccggctaccgaacgcctgtattccgccgtgcgtcacgtagttggtcagaaacctacttcagatcgcccatacatctggaacgataacgagcagggtctggatgaacacatcgctcgcatctccgctgacattgccgctggcggagtaattgttcaagctgtacaggatatcctgccgtgcctgcactaaccggcttatcggtcagtttcacctgatttacgtaaaaacccgcttcggcgggtttttgcttttggaggggcagaaagatgaatgactgtccacgacgctatacccaaaagaaa

SEQ ID NO: 384 - DNA, 5122 bp, synthetic construct
  source 1..5122: mol_type = other DNA
aggctaggtggaggctcagtgatgataagtctgcgatggtggatgcatgtgtcatggtcatagctgtttcctgtgtgaaattgttatccgctcagagggcacaatcctattccgcgctatccgacaatctccaagacattaggtggagttcagttcggcgagcggaaatggcttacgaacggggcggagatttcctggaagatgccaggaagatacttaacagggaagtgagagggccgcggcaaagccgtttttccataggctccgcccccctgacaagcatcacgaaatctgacgctcaaatcagtggtggcgaaacccgacaggactataaagataccaggcgtttccccctggcggctccctcgtgcgctctcctgttcctgcctttcggtttaccggtgtcattccgctgttatggccgcgtttgtctcattccacgcctgacactcagttccgggtaggcagttcgctccaagctggactgtatgcacgaaccccccgttcagtccgaccgctgcgccttatccggtaactatcgtcttgagtccaacccggaaagacatgcaaaagcaccactggcagcagccactggtaattgatttagaggagttagtcttgaagtcatgcgccggttaaggctaaactgaaaggacaagttttggtgactgcgctcctccaagccagttacctcggttcaaagagttggtagctcagagaaccttcgaaaaaccgccctgcaaggcggttttttcgttttcagagcaagagattacgcgcagaccaaaacgatctcaagaagatcatcttattaagtctgacgctctattcaacaaagccgccgtccatgggtagggggcttcaaatcgtcctcgtgataccaattcggagcctgcttttttgtacaaacttgttgataatggcaattcaaggatcttcacctagatccttttaaattaaaaatgaagttttaaatcaatctaaagtatatatgagtaaacttggtctgacagttaccaatgcttaatcagtgaggcacctatctcagcgatctgtctatttcgttcatccatagttgcctgactccccgtcgtgtagataactacgatacgggagggcttaccatctggccccagtgctgcaatgataccgcgagagccacgctcaccggctccagatttatcagcaataaaccagccagccggaagggccgagcgcagaagtggtcctgcaactttatccgcctccatccagtctattaattgttgccgggaagctagagtaagtagttcgccagttaatagtttgcgcaacgttgttgccattgctacaggcatcgtggtgtcacgctcgtcgtttggtatggcttcattcagctccggttcccaacgatcaaggcgagttacatgatcccccatgttgtgcaaaaaagcggttagctccttcggtcctccgatcgttgtcagaagtaagttggccgcagtgttatcactcatggttatggcagcactgcataattctcttactgtcatgccatccgtaagatgcttttctgtgactggtgagtactcaaccaagtcattctgagaatagtgtatgcggcgaccgagttgctcttgcccggcgtcaatacgggataataccgcgccacatagcagaactttaaaagtgctcatcattggaaaacgttcttcggggcgaaaactctcaaggatcttaccgctgttgagatccagttcgatgtaacccactcgtgcacccaactgatcttcagcatcttttactttcaccagcgtttctgggtgagcaaaaacaggaaggcaaaatgccgcaaaaaagggaataagggcgacacggaaatgttgaatactcatactcttcctttttcaatattattgaagcatttatcagggttattgtctcatgagcggatacatatttgaatgtatttagaaaaataaacaaataggggttccgcgcacatttccccgaaaagtgccagatacctgaaacaaaacccatcgtacggccaaggaagtctccaataactgtgatccaccacaagcgccagggttttcccagtcacgacgttgtaaaacgacggccagtcatgcataatccgcacgcatctggaataaggaagtgccattccgcctgacctttgcctatgaggaccaaaacgaaaaaacaccctttcgggtgtcttttctggaatttggtaccgagaggctccatgattcagtatgacttgcctttggtcgaaaaaaaaagcccgcactgtcaggtgcgggcttttttctgtgtttccttattaggacccactttcacatttaagttgtttttctaatccgcatatgatcaattcaaggccgaataagaaggctggctctgcaccttggtgatcaaataattcgatagcttgtcgtaataatggcggcatactatcagtagtaggtgtttccctttcttctttagcgacttgatgctcttgatcttccaatacgcaacctaaagtaaaatgccccacagcgctgagtgcatataatgcattctctagtgaaaaaccttgttggcataaaaaggctaattgattttcgagagtttcatactgtttttctgtaggccgtgtacctaaatgtacttttgctccatcgcgatgacttagtaaagcacatctaaaacttttagcgttattacgtaaaaaatcttgccagctttccccttctaaagggcaaaagtgagtatggtgcctatctaacatctcaatggctaaggcgtcgagcaaagcccgcttattttttacatgccaatacaatgtaggctgctctacacctagcttctgggcgagtttacgggttgttaaaccttcgattccgacctcattaagcagctctaatgcgctgttaatcactttacttttatctaatctggacatattcaccaccctgaattgactctcttccgggcgctatcatgccataccgcgaaaggttttgcgccattcgatggcgcgccgccattgcttgtgcaatgtacatcagagattttgagacacaaccaattattgaaggcctccctaacggggggcctttttttgtttctggtcccccgcttaacgatcgttggctgttttcagcaggacgcactgacctccctatcagtgatagagattgacatccctatcagtgatagagatactgagcacagctgtcaccggatgtgctttccggtctgatgagtccgtgaggacgaaacagcctctacaaataattttgtttaaatcacacgggtaaggaggtatttaaatgaaaacactgtcccaagcacagtcgaagacgagtagccagcagttttctttcaccggtaattctagcgctaacgtgattatcggcaaccagaaactaactatcaacgacgtcgcccgcgttgctcggaacgggaccttagtaagcctgactaacaacactgatatacttcaaggcattcaggcgtcctgtgattatatcaataacgcagttgagtctggtgaaccaatttacggtgtgacctcaggcttcggcggtatggcgaacgttgctatcagccgtgaacaggcctccgaactgcaaaccaatttggtatggcaccataaaactggtgctgggaacaaactccctttggcggacgtacgtgcagcaatgctgctgcgcgccaactcgcatatgcgtggcgcgtccggtatccgtctggagctgatcaaacgtatggaaatcttcttgaacgctggtgttactccgtacgtttatgaatttggatctatcggcgcttctggagatctggtcccgctgagctacattacgggttccctgattggccttgacccgagcttcaaggtggatttcaacggcaaagaaatggacgccccgaccgcgttacgccagttaaatctgtctcccctgacacttctgcctaaagaagcgctagctatgatgaatgggacctcagtcatgactggcatcgcagctaactgcgtatacgacacccagatcctgactgcgattgcaatgggtgttcacgctctggatatccaggccctgaacggcaccaaccagtctttccacccgtttatccataactctaagccgcacccaggtcagctgtgggcggctgatcagatgatatcattgctggctaactcgcaactggtacgggacgagctggacggcaaacatgattaccgcgaccacgagctgatccaggatcgttatagcctgcgttgccttccgcagtacctgggtccgattgtggacggtatctcacagatagcaaaacaaatcgaaattgaaattaactccgttactgataaccctctgattgacgtcgataaccaggcgtcgtaccacggcggaaatttcctgggtcagtatgttggcatgggtatggaccaccttcgctactatatcggcctgctggcgaaacacctggatgtgcagattgcgctgctagctagtcccgaatttagcaacggactgccgccatctttattgggcaaccgtgaacgtaaggttaacatgggtctgaaaggtttacaaatctgtggcaattccatcatgccgctgctgacgttctacggcaatagcatcgccgaccgctttccgacccatgcagagcaattcaaccagaatatcaactctcagggctacacctccgcaacgctggcgcgacgtagtgttgatatcttccaaaactacgttgcgattgccctgatgtttggcgtccaggctgtagacctgaggacttataaaaagactggccattacgatgcgcgtgcttgcctctctccggctaccgaacgcctgtattccgccgtgcgtcacgtagttggtcagaaacctacttcagatcgcccatacatctggaacgataacgagcagggtctggatgaacacatcgctcgcatctccgctgacattgccgctggcggagtaattgttcaagctgtacaggatatcctgccgtgcctgcactaaccggcttatcggtcagtttcacctgatttacgtaaaaacccgcttcggcgggtttttgcttttggaggggcagaaagatgaatgactgtccacgacgctatacccaaaagaaa

SEQ ID NO: 385 - DNA, 5122 bp, synthetic construct
  source 1..5122: mol_type = other DNA
aggctaggtggaggctcagtgatgataagtctgcgatggtggatgcatgtgtcatggtcatagctgtttcctgtgtgaaattgttatccgctcagagggcacaatcctattccgcgctatccgacaatctccaagacattaggtggagttcagttcggcgagcggaaatggcttacgaacggggcggagatttcctggaagatgccaggaagatacttaacagggaagtgagagggccgcggcaaagccgtttttccataggctccgcccccctgacaagcatcacgaaatctgacgctcaaatcagtggtggcgaaacccgacaggactataaagataccaggcgtttccccctggcggctccctcgtgcgctctcctgttcctgcctttcggtttaccggtgtcattccgctgttatggccgcgtttgtctcattccacgcctgacactcagttccgggtaggcagttcgctccaagctggactgtatgcacgaaccccccgttcagtccgaccgctgcgccttatccggtaactatcgtcttgagtccaacccggaaagacatgcaaaagcaccactggcagcagccactggtaattgatttagaggagttagtcttgaagtcatgcgccggttaaggctaaactgaaaggacaagttttggtgactgcgctcctccaagccagttacctcggttcaaagagttggtagctcagagaaccttcgaaaaaccgccctgcaaggcggttttttcgttttcagagcaagagattacgcgcagaccaaaacgatctcaagaagatcatcttattaagtctgacgctctattcaacaaagccgccgtccatgggtagggggcttcaaatcgtcctcgtgataccaattcggagcctgcttttttgtacaaacttgttgataatggcaattcaaggatcttcacctagatccttttaaattaaaaatgaagttttaaatcaatctaaagtatatatgagtaaacttggtctgacagttaccaatgcttaatcagtgaggcacctatctcagcgatctgtctatttcgttcatccatagttgcctgactccccgtcgtgtagataactacgatacgggagggcttaccatctggccccagtgctgcaatgataccgcgagagccacgctcaccggctccagatttatcagcaataaaccagccagccggaagggccgagcgcagaagtggtcctgcaactttatccgcctccatccagtctattaattgttgccgggaagctagagtaagtagttcgccagttaatagtttgcgcaacgttgttgccattgctacaggcatcgtggtgtcacgctcgtcgtttggtatggcttcattcagctccggttcccaacgatcaaggcgagttacatgatcccccatgttgtgcaaaaaagcggttagctccttcggtcctccgatcgttgtcagaagtaagttggccgcagtgttatcactcatggttatggcagcactgcataattctcttactgtcatgccatccgtaagatgcttttctgtgactggtgagtactcaaccaagtcattctgagaatagtgtatgcggcgaccgagttgctcttgcccggcgtcaatacgggataataccgcgccacatagcagaactttaaaagtgctcatcattggaaaacgttcttcggggcgaaaactctcaaggatcttaccgctgttgagatccagttcgatgtaacccactcgtgcacccaactgatcttcagcatcttttactttcaccagcgtttctgggtgagcaaaaacaggaaggcaaaatgccgcaaaaaagggaataagggcgacacggaaatgttgaatactcatactcttcctttttcaatattattgaagcatttatcagggttattgtctcatgagcggatacatatttgaatgtatttagaaaaataaacaaataggggttccgcgcacatttccccgaaaagtgccagatacctgaaacaaaacccatcgtacggccaaggaagtctccaataactgtgatccaccacaagcgccagggttttcccagtcacgacgttgtaaaacgacggccagtcatgcataatccgcacgcatctggaataaggaagtgccattccgcctgacctttgcctatgaggaccaaaacgaaaaaacaccctttcgggtgtcttttctggaatttggtaccgagaggctccatgattcagtatgacttgcctttggtcgaaaaaaaaagcccgcactgtcaggtgcgggcttttttctgtgtttccttattaggacccactttcacatttaagttgtttttctaatccgcatatgatcaattcaaggccgaataagaaggctggctctgcaccttggtgatcaaataattcgatagcttgtcgtaataatggcggcatactatcagtagtaggtgtttccctttcttctttagcgacttgatgctcttgatcttccaatacgcaacctaaagtaaaatgccccacagcgctgagtgcatataatgcattctctagtgaaaaaccttgttggcataaaaaggctaattgattttcgagagtttcatactgtttttctgtaggccgtgtacctaaatgtacttttgctccatcgcgatgacttagtaaagcacatctaaaacttttagcgttattacgtaaaaaatcttgccagctttccccttctaaagggcaaaagtgagtatggtgcctatctaacatctcaatggctaaggcgtcgagcaaagcccgcttattttttacatgccaatacaatgtaggctgctctacacctagcttctgggcgagtttacgggttgttaaaccttcgattccgacctcattaagcagctctaatgcgctgttaatcactttacttttatctaatctggacatattcaccaccctgaattgactctcttccgggcgctatcatgccataccgcgaaaggttttgcgccattcgatggcgcgccgccattgcttgtgcaatgtacatcagagattttgagacacaaccaattattgaaggcctccctaacggggggcctttttttgtttctggtcccccgcttaacgatcgttggctgttttcagcaggacgcactgacctccctatcagtgatagagattgacatccctatcagtgatagagatactgagcacagctgtcaccggatgtgctttccggtctgatgagtccgtgaggacgaaacagcctctacaaataattttgtttaaatcacacgggtaaggaggtatttaaatgaaaacactgtcccaagcacagtcgaagacgagtagccagcagttttctttcaccggtaattctagcgctaacgtgattatcggcaaccagaaactaactatcaacgacgtcgcccgcgttgctcggaacgggaccttagtaagcctgactaacaacactgatatacttcaaggcattcaggcgtcctgtgattatatcaataacgcagttgagtctggtgaaccaatttacggtgtgacctcaggcttcggcggtatggcgaacgttgctatcagccgtgaacaggcctccgaactgcaagagaatatggtatggtatacaaaaactggtgctgggaacaaactccctttggcggacgtacgtgcagcaatgctgctgcgcgccaactcgcatatgcgtggcgcgtccggtatccgtctggagctgatcaaacgtatggaaatcttcttgaacgctggtgttactccgtacgtttatgaatttggatctatcggcgcttctggagatctggtcccgctgagctacattacgggttccctgattggccttgacccgagcttcaaggtggatttcaacggcaaagaaatggacgccccgaccgcgttacgccagttaaatctgtctcccctgacacttctgcctaaagaaagtctagctatgattaatgggacctcagtcatgactggcatcgcagctaactgcgtatacgacacccagatcctgactgcgattgcaatgggtgttcacgctctggatatccaggccctgaacggcaccaaccagtctttccacccgtttatccataactctaagccgcacccaggtcagctgtgggcggctgatcagatgatatcattgctggctaactcgcaactggtacgggacgagctggacggcaaacatgattaccgcgaccacgagctgatccaggatcgttatagcctgcgttgccttccgcagtacctgggtccgattgtggacggtatctcacagatagcaaaacaaatcgaaattgaaattaactccgttactgataaccctctgattgacgtcgataaccaggcgtcgtaccacggcggaaatttcctgggtcagtatgttggcatgggtatggaccaccttcgctactatatcggcctgctggcgaaacacctggatgtgcagattgcgctgctagctagtcccgaatttagcaacggactgccgccatctttattgggcaaccgtgaacgtaaggttaacatgggtctgaaaggtttacaaatctgtggcaattccatcatgccgctgctgacgttctacggcaatagcatcgccgaccgctttccgacccatgcagagcaattcaaccagaatatcaactctcagggctacacctccgcaacgctggcgcgacgtagtgttgatatcttccaaaactacgttgcgattgccctgatgtttggcgtccaggctgtagacctgaggacttataaaaagactggccattacgatgcgcgtgcttgcctctctccggctaccgaacgcctgtattccgccgtgcgtcacgtagttggtcagaaacctacttcagatcgcccatacatctggaacgataacgagcagggtctggatgaacacatcgctcgcatctccgctgacattgccgctggcggagtaattgttcaagctgtacaggatatcctgccgtgcctgcactaaccggcttatcggtcagtttcacctgatttacgtaaaaacccgcttcggcgggtttttgcttttggaggggcagaaagatgaatgactgtccacgacgctatacccaaaagaaa

SEQ ID NO: 386 - DNA, 5122 bp, synthetic construct
  source 1..5122: mol_type = other DNA
aggctaggtggaggctcagtgatgataagtctgcgatggtggatgcatgtgtcatggtcatagctgtttcctgtgtgaaattgttatccgctcagagggcacaatcctattccgcgctatccgacaatctccaagacattaggtggagttcagttcggcgagcggaaatggcttacgaacggggcggagatttcctggaagatgccaggaagatacttaacagggaagtgagagggccgcggcaaagccgtttttccataggctccgcccccctgacaagcatcacgaaatctgacgctcaaatcagtggtggcgaaacccgacaggactataaagataccaggcgtttccccctggcggctccctcgtgcgctctcctgttcctgcctttcggtttaccggtgtcattccgctgttatggccgcgtttgtctcattccacgcctgacactcagttccgggtaggcagttcgctccaagctggactgtatgcacgaaccccccgttcagtccgaccgctgcgccttatccggtaactatcgtcttgagtccaacccggaaagacatgcaaaagcaccactggcagcagccactggtaattgatttagaggagttagtcttgaagtcatgcgccggttaaggctaaactgaaaggacaagttttggtgactgcgctcctccaagccagttacctcggttcaaagagttggtagctcagagaaccttcgaaaaaccgccctgcaaggcggttttttcgttttcagagcaagagattacgcgcagaccaaaacgatctcaagaagatcatcttattaagtctgacgctctattcaacaaagccgccgtccatgggtagggggcttcaaatcgtcctcgtgataccaattcggagcctgcttttttgtacaaacttgttgataatggcaattcaaggatcttcacctagatccttttaaattaaaaatgaagttttaaatcaatctaaagtatatatgagtaaacttggtctgacagttaccaatgcttaatcagtgaggcacctatctcagcgatctgtctatttcgttcatccatagttgcctgactccccgtcgtgtagataactacgatacgggagggcttaccatctggccccagtgctgcaatgataccgcgagagccacgctcaccggctccagatttatcagcaataaaccagccagccggaagggccgagcgcagaagtggtcctgcaactttatccgcctccatccagtctattaattgttgccgggaagctagagtaagtagttcgccagttaatagtttgcgcaacgttgttgccattgctacaggcatcgtggtgtcacgctcgtcgtttggtatggcttcattcagctccggttcccaacgatcaaggcgagttacatgatcccccatgttgtgcaaaaaagcggttagctccttcggtcctccgatcgttgtcagaagtaagttggccgcagtgttatcactcatggttatggcagcactgcataattctcttactgtcatgccatccgtaagatgcttttctgtgactggtgagtactcaaccaagtcattctgagaatagtgtatgcggcgaccgagttgctcttgcccggcgtcaatacgggataataccgcgccacatagcagaactttaaaagtgctcatcattggaaaacgttcttcggggcgaaaactctcaaggatcttaccgctgttgagatccagttcgatgtaacccactcgtgcacccaactgatcttcagcatcttttactttcaccagcgtttctgggtgagcaaaaacaggaaggcaaaatgccgcaaaaaagggaataagggcgacacggaaatgttgaatactcatactcttcctttttcaatattattgaagcatttatcagggttattgtctcatgagcggatacatatttgaatgtatttagaaaaataaacaaataggggttccgcgcacatttccccgaaaagtgccagatacctgaaacaaaacccatcgtacggccaaggaagtctccaataactgtgatccaccacaagcgccagggttttcccagtcacgacgttgtaaaacgacggccagtcatgcataatccgcacgcatctggaataaggaagtgccattccgcctgacctttgcctatgaggaccaaaacgaaaaaacaccctttcgggtgtcttttctggaatttggtaccgagaggctccatgattcagtatgacttgcctttggtcgaaaaaaaaagcccgcactgtcaggtgcgggcttttttctgtgtttccttattaggacccactttcacatttaagttgtttttctaatccgcatatgatcaattcaaggccgaataagaaggctggctctgcaccttggtgatcaaataattcgatagcttgtcgtaataatggcggcatactatcagtagtaggtgtttccctttcttctttagcgacttgatgctcttgatcttccaatacgcaacctaaagtaaaatgccccacagcgctgagtgcatataatgcattctctagtgaaaaaccttgttggcataaaaaggctaattgattttcgagagtttcatactgtttttctgtaggccgtgtacctaaatgtacttttgctccatcgcgatgacttagtaaagcacatctaaaacttttagcgttattacgtaaaaaatcttgccagctttccccttctaaagggcaaaagtgagtatggtgcctatctaacatctcaatggctaaggcgtcgagcaaagcccgcttattttttacatgccaatacaatgtaggctgctctacacctagcttctgggcgagtttacgggttgttaaaccttcgattccgacctcattaagcagctctaatgcgctgttaatcactttacttttatctaatctggacatattcaccaccctgaattgactctcttccgggcgctatcatgccataccgcgaaaggttttgcgccattcgatggcgcgccgccattgcttgtgcaatgtacatcagagattttgagacacaaccaattattgaaggcctccctaacggggggcctttttttgtttctggtcccccgcttaacgatcgttggctgttttcagcaggacgcactgacctccctatcagtgatagagattgacatccctatcagtgatagagatactgagcacagctgtcaccggatgtgctttccggtctgatgagtccgtgaggacgaaacagcctctacaaataattttgtttaaatcacacgggtaaggaggtatttaaatgaaaacactgtcccaagcacagtcgaagacgagtagccagcagttttctttcaccggtaattctagcgctaacgtgattatcggcaaccagaaactaactatcaacgacgtcgcccgcgttgctcggaacgggaccttagtaagcctgactaacaacactgatatacttcaaggcattcaggcgtcctgtgattatatcaataacgcagttgagtctggtgaaccaatttacggtgtgacctcaggcttcggcggtatggcgaacgttgctatcagccgtgaacaggcctccgaactgcaaaccaatatggtatggtatgtcaaaactggtgctgggaacaaactccctttggcggacgtacgtgcagcaatgctgctgcgcgccaactcgcatatgcgtggcgcgtccggtatccgtctggagctgatcaaacgtatggaaatcttcttgaacgctggtgttactccgtacgtttatgaatttggatctatcggcgcttctggagatctggtcccgctgagctacattacgggttccctgattggccttgacccgagcttcaaggtggatttcaacggcaaagaaatggacgccccgaccgcgttacgccagttaaatctgtctcccctgacacttctgcctaaagaaagtatagctatgctcaatgggacctcagtcatgactggcatcgcagctaactgcgtatacgacacccagatcctgactgcgattgcaatgggtgttcacgctctggatatccaggccctgaacggcaccaaccagtctttccacccgtttatccataactctaagccgcacccaggtcagctgtgggcggctgatcagatgatatcattgctggctaactcgcaactggtacgggacgagctggacggcaaacatgattaccgcgaccacgagctgatccaggatcgttatagcctgcgttgccttccgcagtacctgggtccgattgtggacggtatctcacagatagcaaaacaaatcgaaattgaaattaactccgttactgataaccctctgattgacgtcgataaccaggcgtcgtaccacggcggaaatttcctgggtcagtatgttggcatgggtatggaccaccttcgctactatatcggcctgctggcgaaacacctggatgtgcagattgcgctgctagctagtcccgaatttagcaacggactgccgccatctttattgggcaaccgtgaacgtaaggttaacatgggtctgaaaggtttacaaatctgtggcaattccatcatgccgctgctgacgttctacggcaatagcatcgccgaccgctttccgacccatgcagagcaattcaaccagaatatcaactctcagggctacacctccgcaacgctggcgcgacgtagtgttgatatcttccaaaactacgttgcgattgccctgatgtttggcgtccaggctgtagacctgaggacttataaaaagactggccattacgatgcgcgtgcttgcctctctccggctaccgaacgcctgtattccgccgtgcgtcacgtagttggtcagaaacctacttcagatcgcccatacatctggaacgataacgagcagggtctggatgaacacatcgctcgcatctccgctgacattgccgctggcggagtaattgttcaagctgtacaggatatcctgccgtgcctgcactaaccggcttatcggtcagtttcacctgatttacgtaaaaacccgcttcggcgggtttttgcttttggaggggcagaaagatgaatgactgtccacgacgctatacccaaaagaaa

SEQ ID NO: 387 - DNA, 5122 bp, synthetic construct
  source 1..5122: mol_type = other DNA
aggctaggtggaggctcagtgatgataagtctgcgatggtggatgcatgtgtcatggtcatagctgtttcctgtgtgaaattgttatccgctcagagggcacaatcctattccgcgctatccgacaatctccaagacattaggtggagttcagttcggcgagcggaaatggcttacgaacggggcggagatttcctggaagatgccaggaagatacttaacagggaagtgagagggccgcggcaaagccgtttttccataggctccgcccccctgacaagcatcacgaaatctgacgctcaaatcagtggtggcgaaacccgacaggactataaagataccaggcgtttccccctggcggctccctcgtgcgctctcctgttcctgcctttcggtttaccggtgtcattccgctgttatggccgcgtttgtctcattccacgcctgacactcagttccgggtaggcagttcgctccaagctggactgtatgcacgaaccccccgttcagtccgaccgctgcgccttatccggtaactatcgtcttgagtccaacccggaaagacatgcaaaagcaccactggcagcagccactggtaattgatttagaggagttagtcttgaagtcatgcgccggttaaggctaaactgaaaggacaagttttggtgactgcgctcctccaagccagttacctcggttcaaagagttggtagctcagagaaccttcgaaaaaccgccctgcaaggcggttttttcgttttcagagcaagagattacgcgcagaccaaaacgatctcaagaagatcatcttattaagtctgacgctctattcaacaaagccgccgtccatgggtagggggcttcaaatcgtcctcgtgataccaattcggagcctgcttttttgtacaaacttgttgataatggcaattcaaggatcttcacctagatccttttaaattaaaaatgaagttttaaatcaatctaaagtatatatgagtaaacttggtctgacagttaccaatgcttaatcagtgaggcacctatctcagcgatctgtctatttcgttcatccatagttgcctgactccccgtcgtgtagataactacgatacgggagggcttaccatctggccccagtgctgcaatgataccgcgagagccacgctcaccggctccagatttatcagcaataaaccagccagccggaagggccgagcgcagaagtggtcctgcaactttatccgcctccatccagtctattaattgttgccgggaagctagagtaagtagttcgccagttaatagtttgcgcaacgttgttgccattgctacaggcatcgtggtgtcacgctcgtcgtttggtatggcttcattcagctccggttcccaacgatcaaggcgagttacatgatcccccatgttgtgcaaaaaagcggttagctccttcggtcctccgatcgttgtcagaagtaagttggccgcagtgttatcactcatggttatggcagcactgcataattctcttactgtcatgccatccgtaagatgcttttctgtgactggtgagtactcaaccaagtcattctgagaatagtgtatgcggcgaccgagttgctcttgcccggcgtcaatacgggataataccgcgccacatagcagaactttaaaagtgctcatcattggaaaacgttcttcggggcgaaaactctcaaggatcttaccgctgttgagatccagttcgatgtaacccactcgtgcacccaactgatcttcagcatcttttactttcaccagcgtttctgggtgagcaaaaacaggaaggcaaaatgccgcaaaaaagggaataagggcgacacggaaatgttgaatactcatactcttcctttttcaatattattgaagcatttatcagggttattgtctcatgagcggatacatatttgaatgtatttagaaaaataaacaaataggggttccgcgcacatttccccgaaaagtgccagatacctgaaacaaaacccatcgtacggccaaggaagtctccaataactgtgatccaccacaagcgccagggttttcccagtcacgacgttgtaaaacgacggccagtcatgcataatccgcacgcatctggaataaggaagtgccattccgcctgacctttgcctatgaggaccaaaacgaaaaaacaccctttcgggtgtcttttctggaatttggtaccgagaggctccatgattcagtatgacttgcctttggtcgaaaaaaaaagcccgcactgtcaggtgcgggcttttttctgtgtttccttattaggacccactttcacatttaagttgtttttctaatccgcatatgatcaattcaaggccgaataagaaggctggctctgcaccttggtgatcaaataattcgatagcttgtcgtaataatggcggcatactatcagtagtaggtgtttccctttcttctttagcgacttgatgctcttgatcttccaatacgcaacctaaagtaaaatgccccacagcgctgagtgcatataatgcattctctagtgaaaaaccttgttggcataaaaaggctaattgattttcgagagtttcatactgtttttctgtaggccgtgtacctaaatgtacttttgctccatcgcgatgacttagtaaagcacatctaaaacttttagcgttattacgtaaaaaatcttgccagctttccccttctaaagggcaaaagtgagtatggtgcctatctaacatctcaatggctaaggcgtcgagcaaagcccgcttattttttacatgccaatacaatgtaggctgctctacacctagcttctgggcgagtttacgggttgttaaaccttcgattccgacctcattaagcagctctaatgcgctgttaatcactttacttttatctaatctggacatattcaccaccctgaattgactctcttccgggcgctatcatgccataccgcgaaaggttttgcgccattcgatggcgcgccgccattgcttgtgcaatgtacatcagagattttgagacacaaccaattattgaaggcctccctaacggggggcctttttttgtttctggtcccccgcttaacgatcgttggctgttttcagcaggacgcactgacctccctatcagtgatagagattgacatccctatcagtgatagagatactgagcacagctgtcaccggatgtgctttccggtctgatgagtccgtgaggacgaaacagcctctacaaataattttgtttaaatcacacgggtaaggaggtatttaaatgaaaacactgtcccaagcacagtcgaagacgagtagccagcagttttctttcaccggtaattctagcgctaacgtgattatcggcaaccagaaactaactatcaacgacgtcgcccgcgttgctcggaacgggaccttagtaagcctgactaacaacactgatatacttcaaggcattcaggcgtcctgtgattatatcaataacgcagttgagtctggtgaaccaatttacggtgtgacctcaggcttcggcggtatggcgaacgttgctatcagccgtgaacaggcctccgaactgcaatcgaatttggtatggagtcagaaaactggtgctgggaacaaactccctttggcggacgtacgtgcagcaatgctgctgcgcgccaactcgcatatgcgtggcgcgtccggtatccgtctggagctgatcaaacgtatggaaatcttcttgaacgctggtgttactccgtacgtttatgaatttggatctatcggcgcttctggagatctggtcccgctgagctacattacgggttccctgattggccttgacccgagcttcaaggtggatttcaacggcaaagaaatggacgccccgaccgcgttacgccagttaaatctgtctcccctgacacttctgcctaaagaaggtattgctatgctcaatgggacctcagtcatgactggcatcgcagctaactgcgtatacgacacccagatcctgactgcgattgcaatgggtgttcacgctctggatatccaggccctgaacggcaccaaccagtctttccacccgtttatccataactctaagccgcacccaggtcagctgtgggcggctgatcagatgatatcattgctggctaactcgcaactggtacgggacgagctggacggcaaacatgattaccgcgaccacgagctgatccaggatcgttatagcctgcgttgccttccgcagtacctgggtccgattgtggacggtatctcacagatagcaaaacaaatcgaaattgaaattaactccgttactgataaccctctgattgacgtcgataaccaggcgtcgtaccacggcggaaatttcctgggtcagtatgttggcatgggtatggaccaccttcgctactatatcggcctgctggcgaaacacctggatgtgcagattgcgctgctagctagtcccgaatttagcaacggactgccgccatctttattgggcaaccgtgaacgtaaggttaacatgggtctgaaaggtttacaaatctgtggcaattccatcatgccgctgctgacgttctacggcaatagcatcgccgaccgctttccgacccatgcagagcaattcaaccagaatatcaactctcagggctacacctccgcaacgctggcgcgacgtagtgttgatatcttccaaaactacgttgcgattgccctgatgtttggcgtccaggctgtagacctgaggacttataaaaagactggccattacgatgcgcgtgcttgcctctctccggctaccgaacgcctgtattccgccgtgcgtcacgtagttggtcagaaacctacttcagatcgcccatacatctggaacgataacgagcagggtctggatgaacacatcgctcgcatctccgctgacattgccgctggcggagtaattgttcaagctgtacaggatatcctgccgtgcctgcactaaccggcttatcggtcagtttcacctgatttacgtaaaaacccgcttcggcgggtttttgcttttggaggggcagaaagatgaatgactgtccacgacgctatacccaaaagaaa

SEQ ID NO: 388 - DNA, 5122 bp, synthetic construct
  source 1..5122: mol_type = other DNA
aggctaggtggaggctcagtgatgataagtctgcgatggtggatgcatgtgtcatggtcatagctgtttcctgtgtgaaattgttatccgctcagagggcacaatcctattccgcgctatccgacaatctccaagacattaggtggagttcagttcggcgagcggaaatggcttacgaacggggcggagatttcctggaagatgccaggaagatacttaacagggaagtgagagggccgcggcaaagccgtttttccataggctccgcccccctgacaagcatcacgaaatctgacgctcaaatcagtggtggcgaaacccgacaggactataaagataccaggcgtttccccctggcggctccctcgtgcgctctcctgttcctgcctttcggtttaccggtgtcattccgctgttatggccgcgtttgtctcattccacgcctgacactcagttccgggtaggcagttcgctccaagctggactgtatgcacgaaccccccgttcagtccgaccgctgcgccttatccggtaactatcgtcttgagtccaacccggaaagacatgcaaaagcaccactggcagcagccactggtaattgatttagaggagttagtcttgaagtcatgcgccggttaaggctaaactgaaaggacaagttttggtgactgcgctcctccaagccagttacctcggttcaaagagttggtagctcagagaaccttcgaaaaaccgccctgcaaggcggttttttcgttttcagagcaagagattacgcgcagaccaaaacgatctcaagaagatcatcttattaagtctgacgctctattcaacaaagccgccgtccatgggtagggggcttcaaatcgtcctcgtgataccaattcggagcctgcttttttgtacaaacttgttgataatggcaattcaaggatcttcacctagatccttttaaattaaaaatgaagttttaaatcaatctaaagtatatatgagtaaacttggtctgacagttaccaatgcttaatcagtgaggcacctatctcagcgatctgtctatttcgttcatccatagttgcctgactccccgtcgtgtagataactacgatacgggagggcttaccatctggccccagtgctgcaatgataccgcgagagccacgctcaccggctccagatttatcagcaataaaccagccagccggaagggccgagcgcagaagtggtcctgcaactttatccgcctccatccagtctattaattgttgccgggaagctagagtaagtagttcgccagttaatagtttgcgcaacgttgttgccattgctacaggcatcgtggtgtcacgctcgtcgtttggtatggcttcattcagctccggttcccaacgatcaaggcgagttacatgatcccccatgttgtgcaaaaaagcggttagctccttcggtcctccgatcgttgtcagaagtaagttggccgcagtgttatcactcatggttatggcagcactgcataattctcttactgtcatgccatccgtaagatgcttttctgtgactggtgagtactcaaccaagtcattctgagaatagtgtatgcggcgaccgagttgctcttgcccggcgtcaatacgggataataccgcgccacatagcagaactttaaaagtgctcatcattggaaaacgttcttcggggcgaaaactctcaaggatcttaccgctgttgagatccagttcgatgtaacccactcgtgcacccaactgatcttcagcatcttttactttcaccagcgtttctgggtgagcaaaaacaggaaggcaaaatgccgcaaaaaagggaataagggcgacacggaaatgttgaatactcatactcttcctttttcaatattattgaagcatttatcagggttattgtctcatgagcggatacatatttgaatgtatttagaaaaataaacaaataggggttccgcgcacatttccccgaaaagtgccagatacctgaaacaaaacccatcgtacggccaaggaagtctccaataactgtgatccaccacaagcgccagggttttcccagtcacgacgttgtaaaacgacggccagtcatgcataatccgcacgcatctggaataaggaagtgccattccgcctgacctttgcctatgaggaccaaaacgaaaaaacaccctttcgggtgtcttttctggaatttggtaccgagaggctccatgattcagtatgacttgcctttggtcgaaaaaaaaagcccgcactgtcaggtgcgggcttttttctgtgtttccttattaggacccactttcacatttaagttgtttttctaatccgcatatgatcaattcaaggccgaataagaaggctggctctgcaccttggtgatcaaataattcgatagcttgtcgtaataatggcggcatactatcagtagtaggtgtttccctttcttctttagcgacttgatgctcttgatcttccaatacgcaacctaaagtaaaatgccccacagcgctgagtgcatataatgcattctctagtgaaaaaccttgttggcataaaaaggctaattgattttcgagagtttcatactgtttttctgtaggccgtgtacctaaatgtacttttgctccatcgcgatgacttagtaaagcacatctaaaacttttagcgttattacgtaaaaaatcttgccagctttccccttctaaagggcaaaagtgagtatggtgcctatctaacatctcaatggctaaggcgtcgagcaaagcccgcttattttttacatgccaatacaatgtaggctgctctacacctagcttctgggcgagtttacgggttgttaaaccttcgattccgacctcattaagcagctctaatgcgctgttaatcactttacttttatctaatctggacatattcaccaccctgaattgactctcttccgggcgctatcatgccataccgcgaaaggttttgcgccattcgatggcgcgccgccattgcttgtgcaatgtacatcagagattttgagacacaaccaattattgaaggcctccctaacggggggcctttttttgtttctggtcccccgcttaacgatcgttggctgttttcagcaggacgcactgacctccctatcagtgatagagattgacatccctatcagtgatagagatactgagcacagctgtcaccggatgtgctttccggtctgatgagtccgtgaggacgaaacagcctctacaaataattttgtttaaatcacacgggtaaggaggtatttaaatgaaaacactgtcccaagcacagtcgaagacgagtagccagcagttttctttcaccggtaattctagcgctaacgtgattatcggcaaccagaaactaactatcaacgacgtcgcccgcgttgctcggaacgggaccttagtaagcctgactaacaacactgatatacttcaaggcattcaggcgtcctgtgattatatcaataacgcagttgagtctggtgaaccaatttacggtgtgacctcaggcttcggcggtatggcgaacgttgctatcagccgtgaacaggcctccgaactgcaaagtaatttggtatggtcgcataaaactggtgctgggaacaaactccctttggcggacgtacgtgcagcaatgctgctgcgcgccaactcgcatatgcgtggcgcgtccggtatccgtctggagctgatcaaacgtatggaaatcttcttgaacgctggtgttactccgtacgtttatgaatttggatctatcggcgcttctggagatctggtcccgctgagctacattacgggttccctgattggccttgacccgagcttcaaggtggatttcaacggcaaagaaatggacgccccgaccgcgttacgccagttaaatctgtctcccctgacacttctgcctaaagaaggtattgctatgaataatgggacctcagtcatgactggcatcgcagctaactgcgtatacgacacccagatcctgactgcgattgcaatgggtgttcacgctctggatatccaggccctgaacggcaccaaccagtctttccacccgtttatccataactctaagccgcacccaggtcagctgtgggcggctgatcagatgatatcattgctggctaactcgcaactggtacgggacgagctggacggcaaacatgattaccgcgaccacgagctgatccaggatcgttatagcctgcgttgccttccgcagtacctgggtccgattgtggacggtatctcacagatagcaaaacaaatcgaaattgaaattaactccgttactgataaccctctgattgacgtcgataaccaggcgtcgtaccacggcggaaatttcctgggtcagtatgttggcatgggtatggaccaccttcgctactatatcggcctgctggcgaaacacctggatgtgcagattgcgctgctagctagtcccgaatttagcaacggactgccgccatctttattgggcaaccgtgaacgtaaggttaacatgggtctgaaaggtttacaaatctgtggcaattccatcatgccgctgctgacgttctacggcaatagcatcgccgaccgctttccgacccatgcagagcaattcaaccagaatatcaactctcagggctacacctccgcaacgctggcgcgacgtagtgttgatatcttccaaaactacgttgcgattgccctgatgtttggcgtccaggctgtagacctgaggacttataaaaagactggccattacgatgcgcgtgcttgcctctctccggctaccgaacgcctgtattccgccgtgcgtcacgtagttggtcagaaacctacttcagatcgcccatacatctggaacgataacgagcagggtctggatgaacacatcgctcgcatctccgctgacattgccgctggcggagtaattgttcaagctgtacaggatatcctgccgtgcctgcactaaccggcttatcggtcagtttcacctgatttacgtaaaaacccgcttcggcgggtttttgcttttggaggggcagaaagatgaatgactgtccacgacgctatacccaaaagaaa

SEQ ID NO: 389 - protein, 505 aa, Arabidopsis thaliana
MDLLLLEKSLIAVFVAVILATVISKLRGKKLKLPPGPIPIPIFGNWLQVGDDLNHRNLVDYAKKFGDLFLLRMGQRNLVVVSSPDLTKEVLLTQGVEFGSRTRNVVFDIFTGKGQDMVFTVYGEHWRKMRRIMTVPFFTNKVVQQNREGWEFEAASVVEDVKKNPDSATKGIVLRKRLQLMMYNNMFRIMFDRRFESEDDPLFLRLKALNGERSRLAQSFEYNYGDFIPILRPFLRGYLKICQDVKDRRIALFKKYFVDERKQIASSKPTGSEGLKCAIDHILEAEQKGEINEDNVLYIVENINVAAIETTLWSIEWGIAELVNHPEIQSKLRNELDTVLGPGVQVTEPDLHKLPYLQAVVKETLRLRMAIPLLVPHMNLHDAKLAGYDIPAESKILVNAWWLANNPNSWKKPEEFRPERFFEEESHVEANGNDFRYVPFGVGRRSCPGIILALPILGITIGRMVQNFELLPPPGQSKVDTSEKGGQFSLHILNHSIIVMKPRNC

SEQ ID NO: 390 - DNA, 1515 bp, synthetic construct
  source 1..1515: mol_type = other DNA
atggacttgttgttgttggaaaagtccttgattgctgttttcgttgctgttattttggccaccgttatctctaaattgagaggtaagaaattgaagttgccaccaggtccaattccaatcccaatttttggtaattggttgcaagttggtgatgacttgaaccacagaaacttggttgattacgctaaaaagttcggtgatttgttcttgttgagaatgggtcaaagaaatttggtcgttgtttcctcaccagacttgaccaaagaagttttgttgactcaaggtgtcgaattcggttccagaactagaaatgttgttttcgatatcttcaccggtaagggtcaagatatggtttttactgtttacggtgaacattggagaaagatgagaagaattatgaccgttccattcttcaccaacaaggttgtccaacaaaacagagaaggttgggaatttgaagctgcttctgttgttgaagatgtcaagaagaatccagattctgctactaagggtatcgttttgagaaaaagattgcaattgatgatgtacaacaacatgttcagaatcatgttcgacagaagatttgaatccgaagatgaccctttgtttttgagattgaaggctttgaacggtgaaagatctagattggctcaatccttcgaatacaactacggtgatttcatcccaatcttaagaccattcttgagaggttacttgaagatctgccaagatgttaaggatagaagaatcgccttgttcaaaaagtacttcgttgacgaaagaaagcaaatcgcttcttctaaacctactggttctgaaggtttgaagtgcgccattgatcatattttggaagctgaacaaaagggtgaaatcaacgaagataacgtcttgtacatcgtcgaaaacattaacgttgctgctattgaaactaccttgtggtctattgaatggggtattgctgaattggttaatcacccagaaatccaatccaagttgagaaacgaattggatactgttttgggtccaggtgttcaagttactgaacctgacttgcataagttgccatacttgcaagctgttgtaaaagaaaccttgagattaagaatggccatccctttgttggttccacatatgaacttgcatgatgctaaattggccggttatgatattccagccgaatccaagattttggttaatgcttggtggttggctaacaatccaaattcttggaaaaagccagaagaattcagaccagaaagatttttcgaagaagaaagtcacgttgaagccaacggtaatgattttagatacgttccatttggtgttggtagaagatcttgtccaggtattatcttggctttgccaattttgggtattaccatcggtagaatggtccaaaacttcgaattattgccaccacctggtcaatctaaggttgatacttctgaaaagggtggtcaattctccttgcatattttgaaccactccatcatcgttatgaagccaagaaactgt

What is claimed is:

1. A host cell that comprises a heterologous polynucleotide encoding an aromatic amino acid ammonia lyase (AL), wherein the amino acid sequence of the AL comprises:
a) a histidine (H) at a position corresponding to position 102 in the sequence of SEQ ID NO: 1;
b) an isoleucine (I) at a position corresponding to position 104 in the sequence of SEQ ID NO: 1;
c) a valine (V) at a position corresponding to position 104 in the sequence of SEQ ID NO: 1;
d) a histidine (H) at a position corresponding to position 107 in the sequence of SEQ ID NO: 1;
e) a serine(S) at a position corresponding to position 107 in the sequence of SEQ ID NO: 1;
f) a tyrosine (Y) at a position corresponding to position 107 in the sequence of SEQ ID NO: 1;
g) a methionine (M) at a position corresponding to position 108 in the sequence of SEQ ID NO: 1; or
h) any combination thereof.

2. The host cell of claim 1, wherein the AL is a phenylalanine ammonia lyase (PAL).

3. The host cell of claim 2, wherein the amino acid sequence of the PAL comprises substitutions at positions corresponding to the following positions in the sequence of SEQ ID NO: 1:
i. positions 102, 104, and 218;
ii. positions 104, 108, and 218;
iii. positions 102, 104, 108, 218, and 222;
iv. positions 102 and 222;
v. positions 102, 104, and 219;
vi. positions 102, 108, and 222;
vii. positions 102, 108, 218, and 222;
viii. positions 102 and 218;
ix. positions 102, 104, 108, and 222;
x. positions 102, 104, and 108;
xi. positions 102, 218, and 222;
xii positions 102, 104, 219, and 222;
xiii. positions 102 and 108;
xiv. positions 104 and 222;
xv. positions 102, 108, and 218; or
xvi. positions 104 and 108.

4. The host cell of either one of claim 2 or 3, wherein the amino acid sequence of the PAL comprises the following amino acid substitutions relative to the sequence of SEQ ID NO: 1:
i. T102H, L104M, and G218A;
ii. L104M, L108T, and G218A;
iii. T102E, L104M, L108T, G218A, and M222L;
iv. T102S and M222L;
v. T102H, L104M, and L219I;
vi. T102H, L104M, L108T, G218A, and M222V;
vii. T102S, L108T, and M222L;
viii. T102S, L108T, G218S, and M222L;
ix. T102E, L108T, and M222I;
x. T102E and G218S;
xi. T102K, L104I, L108T, and M222L;
xii. T102S, L104M, and L108M;
xiii. T102K, G218A, and M222T;
xiv. T102S, L104M, L219I, and M222L;
xv. T102H and L108T;
xvi. L104M and M222V;
xvii. T102H, L104M, G218A, and M222T;
xviii. T102S, L108V, and G218A;
xix. L104A, L108T, and G218A;
xx. L104V and L108T; or
xxi. T102K, L108V, and M222L.

5. The host cell of any one of claims 2-4, wherein the amino acid sequence of the PAL comprises the following amino acid substitutions relative to the sequence of SEQ ID NO: 1:
i. T102H, L104A, and G218A;
ii. T102K, L104V, L219I, and M222V;
iii. T102K, L108V, and M222L;
iv. T102H, L108M, G218A, and M222T;
v. T102K, L104A, and M222I;
vi. T102K and M222T;
vii. T102K and L104I;
viii. L104M and M222V;
ix. T102S, L108M, and G218S;
x. T102E and L108M;
xi. T102E, L108M, and G218A;
xii. T102S and L108M;
xiii. L102K and L108M; or
xiv. L108M.

6. The host cell of claim 1, wherein the AL is a tyrosine ammonia lyase (TAL).

7. The host cell of claim 6, wherein the amino acid sequence of the TAL comprises substitutions at positions corresponding to the following positions in the sequence of SEQ ID NO: 1:
i. positions 104, 108, 219, and 222;
ii. positions 102, 108, 218, and 219;
iii. positions 102, 104, 108, 219, and 222;
iv. positions 102, 107, 108, 218, 219, and 222;
v. positions 104, 108, 218, 219, and 222;
vi. positions 102, 104, 107, and 222;
vii. positions 102, 104, 107, 108, 219, and 222;
viii positions 104, 218, and 222;
ix. positions 102, 108, 218, 219, and 222;
x. positions 104, 108, and 218;
xi. positions 102, 107, 108, 219, and 222;
xii. positions 104, 107, 108, and 222;
xiii positions 102, 104, 108, 218, and 219;
xiv. positions 102, 104, 107, 219, and 222;
xv. positions 102, 108, 218, and 222;
xvi. positions 102, 108, and 222;
xvii. positions 102, 104, 108, and 219;
xviii. positions 102, 104, 107, 108, 218, 219, and 222;
xix. positions 102, 104, 107, 108, 218, and 219;
xx. positions 102, 107, 108, 219, and 222;
xxi. positions 102, 104, 107, 108, 218, and 222; or
xxii. positions 102, 104, 107, 108, and 219.

8. The host cell of either one of claim 6 or 7, wherein the amino acid sequence of the TAL comprises the following amino acid substitutions relative to the sequence of SEQ ID NO: 1:
i. L104A, L108Q, L219I, and M222N;
ii. T102S, L108Q, G218A, and L219I;
iii. T102H, L104M, L108M, L219I, and M222L;
iv. T102E, F107Y, L108M, G218S, L219I, and M222N;
v. L104I, L108H, G218A, L219I, and M222V;
vi. T102E, L104M, F107Y, and M222I;
vii. T102E, L104V, F107Y, L108M, L219I, and M222T;
viii. T102S, L104I, G218S, L219I, and M222V;
ix. L104V, G218A, and M222L;
x. T102K, L108H, G218A, L219I, and M222T;
xi. L104I, L108M, and G218S;
xii. T102H, F107Y, L108M, L219I, and M222V;
xiii. L104V, F107H, L108Q, and M222L;
xiv. T102K, L104A, L108Q, G218A, and L219I;
xv. T102S, L104A, F107S, L219I, and M222N;
xvi. T102S, L108H, G218S, and M222V;
xvii. T102K, L104A, L108H, L219I, and M222N;
xviii. T102S, L108H, and M222N;
xix. T102H, L104M, L108M, and L219I;
xx. T102K, L104A, F107Y, L108V, G218A, L219I, and M222N;
xxi. T102H, L108M, G218S, and M222L;
xxii. T102E, L104M, F107Y, L108M, G218A, and L219I;
xxiii. T102E, L104V, F107H, and M222N;
xxiv. T102H, F107H, L108M, L219I, and M222T;
xxv. T102H, L104V, F107S, L108Q, G218S, and M222T;
xxvi. T102E, L104M, F107S, L108M, G218A, and L219I; or
xxvii. T102E, L104V, F107Y, L108M, and L219I.

9. A host cell that comprises a heterologous polynucleotide encoding an aromatic amino acid ammonia lyase (AL), wherein the amino acid sequence of the AL comprises an amino acid substitution at a position corresponding to amino acid residue F107 relative to the sequence of SEQ ID NO: 1.

10. The host cell of claim 9, wherein the amino acid sequence of the AL comprises:
a) a histidine (H) at a position corresponding to position 107 in the sequence of SEQ ID NO: 1;
b) a serine(S) at a position corresponding to position 107 in the sequence of SEQ ID NO: 1; or
c) a tyrosine (Y) at a position corresponding to position 107 in the sequence of SEQ ID NO: 1.

11. A host cell that comprises:
a first heterologous polynucleotide encoding an aromatic amino acid ammonia lyase (AL), wherein the amino acid sequence of the AL comprises one or more amino acid substitutions relative to the sequence of SEQ ID NO:1, and
a second heterologous polynucleotide encoding a coumarate ligase (4CL).

12. A mixture comprising:
a) a host cell comprising a first heterologous polynucleotide encoding an aromatic amino acid ammonia lyase (AL), wherein the amino acid sequence of the AL comprises one or more amino acid substitutions relative to the sequence of SEQ ID NO: 1, and
b) a medium comprising exogenously supplied glucose, phosphoenolpyruvate, erythrose 4-phosphate, 3-deoxy-D-arabino-hept-2-ulosonate 7-phosphate, 3-dehydroquinate, 3-dehydroshikimate, shikimate, chorismate, prephenate, phenylpyruvate, hydroxyphenylpyruvate, phenylalanine, or tyrosine.

13. The host cell or mixture of any one of claims 9-12, wherein the amino acid sequence of the AL comprises an amino acid substitution at a position corresponding to amino acid residue 102, 104, 107, 108, 218, 219, or 222 relative to the sequence of SEQ ID NO: 1.

14. The host cell or mixture of any one of claims 11-13, wherein the AL comprises:
i. a serine(S) at a position corresponding to position 102 in the sequence of SEQ ID NO: 1;
ii. a glutamic acid (E) at a position corresponding to position 102 in the sequence of SEQ ID NO: 1;
iii. a lysine (K) at a position corresponding to position 102 in the sequence of SEQ ID NO: 1;
iv. a histidine (H) at a position corresponding to position 102 in the sequence of SEQ ID NO: 1;
v. a methionine (M) at a position corresponding to position 104 in the sequence of SEQ ID NO: 1;
vi. an alanine (A) at a position corresponding to position 104 in the sequence of SEQ ID NO: 1;
vii. an isoleucine (I) at a position corresponding to position 104 in the sequence of SEQ ID NO: 1;
viii. a valine (V) at a position corresponding to position 104 in the sequence of SEQ ID NO: 1;
ix. a histidine (H) at a position corresponding to position 107 in the sequence of SEQ ID NO: 1;
x. a serine(S) at a position corresponding to position 107 in the sequence of SEQ ID NO: 1;
xi. a tyrosine (Y) at a position corresponding to position 107 in the sequence of SEQ ID NO: 1;
xii. a threonine (T) at a position corresponding to position 108 in the sequence of SEQ ID NO: 1;
xiii. a valine (V) at a position corresponding to position 108 in the sequence of SEQ ID NO: 1;
xiv. a glutamine (Q) at a position corresponding to position 108 in the sequence of SEQ ID NO: 1;
xv. a methionine (M) at a position corresponding to position 108 in the sequence of SEQ ID NO: 1;
xvi. an alanine (A) at a position corresponding to position 218 in the sequence of SEQ ID NO: 1;
xvii. a serine(S) at a position corresponding to position 218 in the sequence of SEQ ID NO: 1;
xviii. an isoleucine (I) at a position corresponding to position 219 in the sequence of SEQ ID NO: 1;
xix. a leucine (L) at a position corresponding to position 222 in the sequence of SEQ ID NO: 1;
xx. an asparagine (N) at a position corresponding to position 222 in the sequence of SEQ ID NO: 1;
xxi. an isoleucine (I) at a position corresponding to position 222 in the sequence of SEQ ID NO: 1;
xxii. a valine (V) at a position corresponding to position 222 in the sequence of SEQ ID NO: 1;
xxiii. a threonine (T) at a position corresponding to position 222 in the sequence of SEQ ID NO: 1; or
xxiv. any combination thereof.

15. The host cell or mixture of any one of claims 11-14, wherein the AL is a phenylalanine ammonia lyase (PAL).

16. The host cell or mixture of claim 15, wherein relative to the sequence of SEQ ID NO: 1, the PAL comprises substitutions at positions corresponding to the following positions in the sequence of SEQ ID NO: 1:
i. positions 102, 104, and 218;
ii. positions 104, 108, and 218;
iii. positions 102, 104, 108, 218, and 222;
iv. positions 102 and 222;
v. positions 102, 104, and 219;
vi. positions 102, 108, and 222;
vii. positions 102, 108, 218, and 222;
viii positions 102 and 218;
ix. positions 102, 104, 108, and 222;
x. positions 102, 104, and 108;
xi. positions 102, 218, and 222;
xii. positions 102, 104, 219, and 222;
xiii. positions 102 and 108;
xiv. positions 104 and 222;
xv. positions 102, 108, and 218; or
xvi. positions 104 and 108.

17. The host cell or mixture of either one of claim 15 or 16, wherein the amino acid sequence of the PAL comprises the following amino acid substitutions relative to the sequence of SEQ ID NO: 1:
i. T102H, L104M, and G218A;
ii. L104M, L108T, and G218A;
iii. T102E, L104M, L108T, G218A, and M222L;
iv. T102S and M222L;
v. T102H, L104M, and L219I;
vi. T102H, L104M, L108T, G218A, and M222V;
vii. T102K and G218A;
viii. T102S, L108T, and M222L;
ix. T102S, L108T, G218S, and M222L;
x. T102E, L108T, and M222I;
xi. T102E and G218S;
xii. T102K, L104I, L108T, and M222L;
xiii. T102S, L104M, and L108M;
xiv. T102K, G218A, and M222T;
xv. T102S, L104M, L219I, and M222L;
xvi. T102H and L108T;
xvii. L104M and M222V;
xviii. T102H, L104M, G218A, and M222T;
xix. T102S, L108V, and G218A;
xx. L104A, L108T, and G218A;
xxi. L104V and L108T; or
xxii. T102K, L108V, and M222L.

18. The host cell or mixture of any one of claims 11-14, wherein the AL is a tyrosine ammonia lyase (TAL).

19. The host cell or mixture of claim 18, wherein the TAL comprises substitutions at positions corresponding to the following positions in the sequence of SEQ ID NO: 1:
i. positions 104, 108, 219, and 222;
ii. positions 102, 108, 218, and 219;
iii. positions 102, 104, 108, 219, and 222;
iv. positions 102, 107, 108, 218, 219, and 222;
v. positions 104, 108, 218, 219, and 222;
vi. positions 102, 104, 107, and 222;
vii. positions 102, 104, 107, 108, 219, and 222;
viii. positions 104, 218, and 222;
ix. positions 102, 108, 218, 219, and 222;
x. positions 104, 108, and 218;
xi. positions 102, 107, 108, 219, and 222;
xii positions 104, 107, 108, and 222;
xiii. positions 102, 104, 108, 218, and 219;
xiv. positions 102, 104, 107, 219, and 222;
xv. positions 102, 108, 218, and 222;
xvi positions 102, 108, and 222;
xvii. positions 102, 104, 108, and 219;
xviii. positions 102, 104, 107, 108, 218, 219, and 222;
xix. positions 102, 104, 107, 108, 218, and 219;
xx. positions 102, 107, 108, 219, and 222;
xxi positions 102, 104, 107, 108, 218, and 222; or
xxii. positions 102, 104, 107, 108, and 219.

20. The host cell or mixture of either one of claim 18 or 19, wherein the amino acid sequence of the TAL comprises the following amino acid substitutions relative to the sequence of SEQ ID NO: 1:
i. L104A, L108Q, L219I, and M222N;
ii. T102S, L108Q, G218A, and L219I;
iii. T102H, L104M, L108M, L219I, and M222L;
iv. T102E, F107Y, L108M, G218S, L219I, and M222N;
v. L104I, L108H, G218A, L219I, and M222V;
vi. T102E, L104M, F107Y, and M222I;
vii. T102E, L104V, F107Y, L108M, L219I, and M222T;
viii. T102S, L104I, G218S, L219I, and M222V;
ix. L104V, G218A, and M222L;
x. T102K, L108H, G218A, L219I, and M222T;
xi. L104I, L108M, and G218S;
xii. T102H, F107Y, L108M, L219I, and M222V;
xiii. L104V, F107H, L108Q, and M222L;
xiv. T102K, L104A, L108Q, G218A, and L219I;
xv. T102S, L104A, F107S, L219I, and M222N;
xvi T102S, L108H, G218S, and M222V;
xvii. T102K, L104A, L108H, L219I, and M222N;
xviii. T102S, L108H, and M222N;
xix. T102H, L104M, L108M, and L219I;
xx. T102K, L104A, F107Y, L108V, G218A, L219I, and M222N;
xxi. T102H, L108M, G218S, and M222L;
xxii. T102E, L104M, F107Y, L108M, G218A, and L219I;
xxiii. T102E, L104V, F107H, and M222N;
xxiv. T102H, F107H, L108M, L219I, and M222T;
xxv. T102H, L104V, F107S, L108Q, G218S, and M222T;
xxvi. T102E, L104M, F107S, L108M, G218A, and L219I; or
xxvii. T102E, L104V, F107Y, L108M, and L219I.

21. The host cell or mixture of any one of claims 18-20, wherein the amino acid sequence of the TAL comprises the following amino acid substitutions relative to the sequence of SEQ ID NO: 1:
i. T102E, L104V, F107Y, and L108H;
ii. T102E, F107Y, L108H, G218A, and M222I;
iii. T102S, F107Y, L108H, G218A, and M222T;
iv. T102E, L104M, F107Y, L108H, and G218A;
v. L219I and M222T;
vi. F107Y, L108H, L219I, and M222T;
vii. L104A, L108Q, L219I, and M222N;
viii. T102S, L108Q, G218A, and L219I;
ix. T102H, L104M, L108M, and L219I;
x. M222L;
xi. T102E, F107Y, L108M, and G218S;
xii. L219I and M222N;
xiii. L104I, L108H, G218A, and L219I;
xiv. M222V;
xv. T102E, L104M, F107Y, and M222I;
xvi. T102E, F107Y, L108H, and M222I;
xvii. T102E, F107Y, L108H, and G218A;
xviii. T102S, F107Y, and L108H;
xix. T102E, F107Y, L108H, and M222T; or
xx. T102E, F107Y, L108H, and L219I.

22. The host cell of any of claims 1-21, wherein the AL comprises an amino acid sequence that has at least 90% identity to the sequence of SEQ ID NO: 1.

23. The host cell of any of claims 1-22, wherein the heterologous polynucleotide comprises a sequence that is at least 90% identical to the sequence of SEQ ID NO: 2.

24. The host cell of any one of claims 1-23, wherein the host cell is a bacterial cell, an archaebacterial cell, an algal cell, a fungal cell, a yeast cell, a plant cell, an animal cell, a mammalian cell, or a human cell.

25. The host cell of claim 24, wherein the host cell is a filamentous fungi cell or a yeast cell.

26. The host cell of claim 25, wherein the yeast cell is a Saccharomyces cell, a Yarrowia cell, a Komagataella cell, or a Pichia cell.

27. The host cell of claim 26, wherein the Saccharomyces cell is a Saccharomyces cerevisiae cell.

28. The host cell of claim 25, wherein the yeast cell is Yarrowia cell.

29. The host cell of claim 24, wherein the host cell is a bacterial cell.

30. The host cell of claim 29, wherein the bacterial cell is an E. coli cell.

31. The host cell of any one of claims 1-30, wherein the AL is able to convert phenylalanine to trans-cinnamic acid.

32. The host cell of any one of claims 1-31, wherein the AL is able to convert tyrosine to p-coumaric acid.

33. The host cell of any one of claims 1-32, comprising one or more enzymes of the shikimate pathway capable of converting phosphoenolpyruvate and erythrose 4-phosphate to chorismate.

34. The host cell of any one of claims 1-33, wherein one or more of the enzymes of the shikimate pathway are encoded by a heterologous polynucleotide.

35. The host cell of any one of claims 1-34, wherein the amino acid sequence(s) of one or more of the enzymes of the shikimate pathway comprise one or more substitutions relative to the amino acid sequence(s) of a wild-type shikimate pathway enzyme.

36. The host cell of any one of claims 1-35, further comprising a heterologous polynucleotide encoding a cinnamate 4-hydroxylase (C4H), a heterologous polynucleotide encoding a coumarate ligase (4CL), or both.

37. The host cell of claim 36, wherein the amino acid sequence of C4H comprises one or more substitutions relative to the amino acid sequence of a parent C4H (SEQ ID NO: 389).

38. The host cell of claim 36, wherein the amino acid sequence of 4CL comprises one or more substitutions relative to the amino acid sequence of wild-type 4CL.

39. The host cell of any one of claims 1-38, further comprising a heterologous polynucleotide encoding one, two, three, four, five, or all of: a coumarate ligase (4CL), a double bond reductase (DBR), a chalcone synthase (CHS), a chalcone 3-hydroxylase (CH₃H), an O-methyltransferase (OMT), and an UDP dependent glycosyltransferase (UGT).

40. The host cell of claim 39, wherein the amino acid sequence(s) of one, two, three, four, five, or all of 4CL, DBR, CHS, CH3H, OMT, or UGT comprises one or more substitutions relative to the amino acid sequence(s) of a wild-type version of the protein.

41. An aromatic amino acid ammonia lyase (AL), wherein the amino acid sequence of the AL comprises:
a) a histidine (H) at a position corresponding to position 102 in the sequence of SEQ ID NO: 1;
b) an isoleucine (I) at a position corresponding to position 104 in the sequence of SEQ ID NO: 1;
c) a valine (V) at a position corresponding to position 104 in the sequence of SEQ ID NO: 1;
d) a histidine (H) at a position corresponding to position 107 in the sequence of SEQ ID NO: 1;
e) a serine(S) at a position corresponding to position 107 in the sequence of SEQ ID NO: 1;
f) a tyrosine (Y) at a position corresponding to position 107 in the sequence of SEQ ID NO: 1;
g) a methionine (M) at a position corresponding to position 108 in the sequence of SEQ ID NO: 1; or
h) any combination thereof.

42. The AL of claim 41, wherein the AL is a phenylalanine ammonia lyase (PAL).

43. The AL of claim 42, wherein the amino acid sequence of the AL comprises substitutions at positions corresponding to the following positions in the sequence of SEQ ID NO: 1:
i. positions 102, 104, and 218;
ii. positions 104, 108, and 218;
iii. positions 102, 104, 108, 218, and 222;
iv. positions 102 and 222;
v. positions 102, 104, and 219;
vi. positions 102, 108, and 222;
vii. positions 102, 108, 218, and 222;
viii positions 102 and 218;
ix. positions 102, 104, 108, and 222;
x. positions 102, 104, and 108;
xi. positions 102, 218, and 222;
xii. positions 102, 104, 219, and 222;
xiii. positions 102 and 108;
xiv. positions 104 and 222;
xv. positions 102, 108, and 218; or
xvi. positions 104 and 108.

44. The AL of either one of claim 41 or 43, wherein the amino acid sequence of the AL comprises the following amino acid substitutions relative to the sequence of SEQ ID NO: 1:
i. T102H, L104M, and G218A;
ii. L104M, L108T, and G218A;
iii. T102E, L104M, L108T, G218A, and M222L;
iv. T102S and M222L;
v. T102H, L104M, and L219I;
vi. T102H, L104M, L108T, G218A, and M222V;
vii. T102S, L108T, and M222L;
viii. T102S, L108T, G218S, and M222L;
ix. T102E, L108T, and M222I;
x. T102E and G218S;
xi. T102K, L104I, L108T, and M222L;
xii. T102S, L104M, and L108M;
xiii. T102K, G218A, and M222T;
xiv. T102S, L104M, L219I, and M222L;
xv. T102H and L108T;
xvi. L104M and M222V;
xvii. T102H, L104M, G218A, and M222T;
xviii. T102S, L108V, and G218A;
xix. L104A, L108T, and G218A;
xx. L104V and L108T; or
xxi. T102K, L108V, and M222L.

45. The AL of any one of claims 41-44, wherein the amino acid sequence of the AL comprises the following amino acid substitutions relative to the sequence of SEQ ID NO: 1:
i. T102H, L104A, and G218A;
ii. T102K, L104V, L219I, and M222V;
iii. T102K, L108V, and M222L;
iv. T102H, L108M, G218A, and M222T;
v. T102K, L104A, and M222I;
vi. T102K and M222T;
vii. T102K and L104I;
viii. L104M and M222V;
ix. T102S, L108M, and G218S;
x. T102E and L108M;
xi. T102E, L108M, and G218A;
xii. T102S and L108M;
xiii. L102K and L108M; or
xiv. L108M.

46. The AL of claim 41, wherein the AL is a tyrosine ammonia lyase (TAL).

47. The AL of claim 41, wherein the amino acid sequence of the AL comprises substitutions at positions corresponding to the following positions in the sequence of SEQ ID NO: 1:
i. positions 104, 108, 219, and 222;
ii. positions 102, 108, 218, and 219;
iii. positions 102, 104, 108, 219, and 222;
iv. positions 102, 107, 108, 218, 219, and 222;
v. positions 104, 108, 218, 219, and 222;
vi. positions 102, 104, 107, and 222;
vii. positions 102, 104, 107, 108, 219, and 222;
viii. positions 104, 218, and 222;
ix. positions 102, 108, 218, 219, and 222;
x. positions 104, 108, and 218;
xi. positions 102, 107, 108, 219, and 222;
xii. positions 104, 107, 108, and 222;
xiii. positions 102, 104, 108, 218, and 219;
xiv positions 102, 104, 107, 219, and 222;
xv. positions 102, 108, 218, and 222;
xvi. positions 102, 108, and 222;
xvii. positions 102, 104, 108, and 219;
xviii. positions 102, 104, 107, 108, 218, 219, and 222;
xix. positions 102, 104, 107, 108, 218, and 219;
xx. positions 102, 107, 108, 219, and 222;
xxi. positions 102, 104, 107, 108, 218, and 222; or
xxii. positions 102, 104, 107, 108, and 219.

48. The AL of either one of claim 41 or 47, wherein the amino acid sequence of the AL comprises the following amino acid substitutions relative to the sequence of SEQ ID NO: 1:
i. L104A, L108Q, L219I, and M222N;
ii. T102S, L108Q, G218A, and L219I;
iii. T102H, L104M, L108M, L219I, and M222L;
iv. T102E, F107Y, L108M, G218S, L219I, and M222N;
v. L104I, L108H, G218A, L219I, and M222V;
vi. T102E, L104M, F107Y, and M222I;
vii. T102E, L104V, F107Y, L108M, L219I, and M222T;
viii. T102S, L104I, G218S, L219I, and M222V;
ix. L104V, G218A, and M222L;
x. T102K, L108H, G218A, L219I, and M222T;
xi. L104I, L108M, and G218S;
xii. T102H, F107Y, L108M, L219I, and M222V;
xiii. L104V, F107H, L108Q, and M222L;
xiv. T102K, L104A, L108Q, G218A, and L219I;
xv. T102S, L104A, F107S, L219I, and M222N;
xvi. T102S, L108H, G218S, and M222V;
xvii. T102K, L104A, L108H, L219I, and M222N;
xviii. T102S, L108H, and M222N;
xix. T102H, L104M, L108M, and L219I;
xx. T102K, L104A, F107Y, L108V, G218A, L219I, and M222N;
xxi. T102H, L108M, G218S, and M222L;
xxii. T102E, L104M, F107Y, L108M, G218A, and L219I;
xxiii. T102E, L104V, F107H, and M222N;
xxiv. T102H, F107H, L108M, L219I, and M222T;
xxv. T102H, L104V, F107S, L108Q, G218S, and M222T;
xxvi. T102E, L104M, F107S, L108M, G218A, and L219I; or
xxvii. T102E, L104V, F107Y, L108M, and L219I.

49. The AL of any of claims 41-48, wherein the amino acid sequence of the AL comprises an amino acid sequence that has at least 90% identity to the sequence of SEQ ID NO: 1.

50. An aromatic amino acid ammonia lyase (AL), wherein the amino acid sequence of the AL comprises an amino acid substitution at a position corresponding to amino acid residue F107 relative to the sequence of SEQ ID NO: 1.

51. The AL of claim 50, wherein the amino acid sequence of the AL comprises:
a) a histidine (H) at a position corresponding to position 107 in the sequence of SEQ ID NO: 1;
b) a serine(S) at a position corresponding to position 107 in the sequence of SEQ ID NO: 1;
c) a tyrosine (Y) at a position corresponding to position 107 in the sequence of SEQ ID NO: 1.

52. The AL of either one of claim 50 or 51, wherein the amino acid sequence of the AL comprises an amino acid substitution at a position corresponding to amino acid residue 102, 104, 108, 218, 219, or 222 relative to the sequence of SEQ ID NO: 1.

53. The AL of any one of claims 41-52, wherein the AL produces more trans-cinnamic acid per unit time than an AL with an amino acid sequence comprising the sequence of SEQ ID NO: 1.

54. The AL of any one of claims 41-53, wherein the AL can produce at least 10%, 20%, 30%, 40%, 50%, 60%, 70%, 80%, 90%, 100%, 200%, or 300% more trans-cinnamic acid per unit time than a AL with an amino acid sequence comprising the sequence of SEQ ID NO: 1.

55. The AL of any one of claims 41-54, wherein the AL can produce at least 10%, 20%, 30%, 40%, 50%, 60%, 70%, 80%, 90%, 100%, 200%, or 300% more trans-cinnamic acid per unit time than coumarate per unit time.

56. The AL of any one of claims 46-52, wherein the AL produces more coumarate per unit time than a TAL with an amino acid sequence comprising the sequence of SEQ ID NO: 1.

57. The AL of any one of claim 46-52 or 56, wherein the AL can produce at least 10%, 20%, 30%, 40%, 50%, 60%, 70%, 80%, 90%, 100%, 200%, or 300% more coumarate per unit time than a TAL with an amino acid sequence comprising the sequence of SEQ ID NO: 1.

58. The AL of any one of claim 46-52, or 56-57, wherein the AL can produce at least 10%, 20%, 30%, 40%, 50%, 60%, 70%, 80%, 90%, 100%, 200%, or 300% more coumarate per unit time than trans-cinnamic acid per unit time.

59. A method of producing an aromatic compound, comprising contacting phenylalanine and/or tyrosine with a host cell of any one of claims 1-40 or an AL of any one of claims 41-58.

60. The method of claim 59, comprising contacting phenylalanine.

61. The method of claim 59 or 60, comprising contacting tyrosine.

62. The method of any one of claims 59-61, wherein the aromatic compound is a flavor or fragrance compound.

63. The method of any one of claims 59-62, wherein the aromatic compound is a phenylpropanoid.

64. The method of any one of claims 59-63, wherein the aromatic compound is a sweetener.

65. The method of any one of claims 59-64, wherein the aromatic compound is a flavonoid.

66. The method of any one of claims 59-64, wherein the aromatic compound is a flavanone.

67. The method of any one of claim 59-64 or 66, wherein the aromatic compound is eriodictyol or a glycoside and/or alkoxy derivative thereof.

68. The method of any one of claim 59-64 or 66, wherein the aromatic compound is hesperetin.

69. The method of any one of claims 59-63, wherein the aromatic compound is a dihydrochalcone.

70. The method of any one of claim 59-64 or 69, wherein the aromatic compound is hesperetin dihydrochalcone 4′-O-glucoside (HDG).

71. The method of any one of claims 59-62, wherein the aromatic compound is vanillin.

72. The method of any one of claims 59-63, wherein the aromatic compound is an hydroxycinnamic acid or a derivative thereof.

73. The method of claim 72, wherein the hydroxycinnamic acid or the derivative thereof is coumaric acid, ferulic acid, sinapic acid, caffeic acid, chlorogenic acid, or rosmarinic acid.

74. The method of 73, wherein the aromatic compound is ferulic acid.

75. A method of improving an aromatic compound manufacturing mixture, comprising contacting the mixture with the AL of any one of claims 41-58.

76. The method of claim 75, wherein the method is a method of improving a flavor or fragrance manufacturing mixture.

77. The method of claim 75 or 76, wherein the aromatic compound manufacturing mixture comprises a shikimate pathway product.

78. The method of claim 77, wherein the shikimate pathway product comprises: chorismate, prephenate, phenylpyruvate, hydroxyphenylpyruvate, phenylalanine, or tyrosine.

79. The method of any one of claims 76-78, wherein improving comprises converting phenylalanine to trans-cinnamic acid.

80. The method of any one of claims 76-78, wherein improving comprises converting tyrosine to coumarate.

81. The method of any one of claims 76-80, wherein improving comprises promoting production of an aromatic compound.

82. The method of any one of claims 59-81, wherein the method occurs in vitro.
